(19) United States
(12) Patent Application Publication
(10) Pub. No.: US 2022/0227867 A1
(43) Pub. Date: Jul. 21, 2022

(54) ICOS TARGETED HETERODIMERIC FUSION PROTEINS CONTAINING IL-15/IL-15RA Fc-FUSION PROTEINS AND ICOS ANTIGEN BINDING DOMAINS

(71) Applicant: Xencor, Inc., Monrovia, CA (US)

(72) Inventors: Matthew J. Bernett, Monrovia, CA (US); John R. Desjarlais, Pasadena, CA (US); Gregory Moore, Azusa, CA (US); Suzanne Schubbert, Long Beach, CA (US)

(21) Appl. No.: 17/561,613

(22) Filed: Dec. 23, 2021

Related U.S. Application Data
(60) Provisional application No. 63/130,541, filed on Dec. 24, 2020.

(51) Int. Cl. C07K 16/28; C07K 14/54; C07K 14/715; C12N 15/63

(52) U.S. Cl. CPC C07K 16/2818; C07K 14/5443; C07K 14/7155; C07K 2319/30; C07K 2317/66; C07K 2317/56; C07K 2317/53; C12N 15/63

(57) ABSTRACT

The present invention is directed to novel targeted heterodimeric Fc fusion proteins comprising an IL-15/IL-15Rα Fc-fusion protein and a ICOS antibody fragment-Fc fusion protein.

### PRIORITY CLAIM

[0001] This application claims the benefit of U.S. Provisional Patent Application No. 63/130,541, filed Dec. 24, 2020, which is hereby incorporated by reference in its entirety.

### SEQUENCE LISTING INCORPORATION PARAGRAPH

[0002] The instant application contains a Sequence Listing which has been submitted electronically in ASCII format and is hereby incorporated by reference in its entirety. Said ASCII copy, created on Dec. 15, 2021, is named 067461-5238-WO_SL.txt and is 1,302,954 bytes in size.

### BACKGROUND

[0003] Two very promising approaches in cancer immunotherapy include cytokine-based treatments and agonism of costimulatory receptors such as ICOS.

[0004] Cytokines such as IL-2 and IL-15 function in aiding the proliferation and differentiation of B cells, T cells, and NK cells. Both cytokines exert their cell signaling function through binding to a trimeric complex consisting of two shared receptors, the common gamma chain (γc; CD132) and IL-2 receptor beta-chain (IL-2Rβ; CD122), as well as an alpha chain receptor unique to each cytokine: IL-2 receptor alpha (IL-2Rα; CD25) or IL-15 receptor alpha (IL-15Rα; CD215). Both cytokines are considered as potentially valuable therapeutics in oncology, and IL-2 has been approved for use in patients with metastatic renal-cell carcinoma and malignant melanoma. Currently, there are no approved uses of recombinant IL-15, although several clinical trials are ongoing. However, as potential drugs, both cytokines suffer from a very fast clearance, with half-lives measured in minutes. IL-2 immunotherapy has been associated with systemic toxicity when administered in high doses to overcome fast clearance. Such systemic toxicity has also been reported with IL-15 immunotherapy in recent clinical trials (Guo et al. 2015).

[0005] Therefore, there remains an unmet need in oncology treatment for therapeutic strategies with cytokines which do not require high doses and are targeted to tumors to avoid systemic toxicity.

### BRIEF SUMMARY

[0006] In some aspects, provided herein is a fusion protein comprising: a) an antigen binding domain that binds human ICOS; and b) an IL-15/IL-15Rα complex.

[0007] In some aspect, provided herein is a heterodimeric protein comprising: a) a first monomer comprising, from N- to C-terminal: i) an IL-15Rα sushi domain; ii) a first domain linker; iii) a variant IL-15 domain; iv) a second domain linker; v) a first variant Fc domain comprising CH2-CH3; b) a second monomer comprising a heavy chain comprising VH1-CH1-hinge-CH2-CH3, wherein said CH2-CH3 is a second variant Fc domain; and c) a light chain comprising VL-CL; wherein said VH1 and VL form an antigen binding domain that binds human ICOS.

[0008] In other aspects, provided herein is a heterodimeric protein comprising: a) a first monomer comprising, from N- to C-terminal: i) an IL-15Rα sushi domain; ii) a first domain linker; iii) a variant IL-15 domain; iv) a second domain linker; v) a first variant Fc domain comprising CH2-CH3; and b) a second monomer comprising, from N- to C-terminal: i) a scFv domain; ii) a third domain linker; iii) a second variant Fc domain comprising CH2-CH3; wherein said scFv domain comprises a first variable heavy domain, an scFv linker and a first variable light domain, wherein said scFv domain binds human ICOS.

[0009] In some aspects, provided herein is a heterodimeric protein comprising: a) a first monomer comprising, from N- to C-terminal: i) a variant IL-15 domain; ii) a first domain linker; iii) an IL-15Rα sushi domain; iv) a second domain linker; v) a first variant Fc domain comprising CH2-CH3; and b) a second monomer comprising, from N- to C-terminal: i) a scFv domain; ii) a third domain linker; iii) a second variant Fc domain comprising CH2-CH3; wherein said scFv domain comprises a first variable heavy domain, an scFv linker and a first variable light domain, wherein said scFv domain binds human ICOS.

[0010] In some aspects, provided herein is a heterodimeric protein comprising: a) a first monomer comprising, from N- to C-terminal: i) a variant IL-15 domain; ii) a first domain linker; iii) a first variant Fc domain comprising CH2-CH3; and b) a second monomer comprising, from N- to C-terminal: i) a scFv domain; ii) a second domain linker; iii) a second variant Fc domain comprising CH2-CH3; wherein said scFv domain comprises a first variable heavy domain, an scFv linker and a first variable light domain, wherein said scFv domain binds human ICOS.

[0011] In certain aspects, provided herein is a heterodimeric protein comprising: a) a first monomer comprising, from N- to C-terminal: i) an IL-15Rα sushi domain; ii) a first domain linker; iii) a first variant Fc domain comprising CH2-CH3; b) a second monomer comprising, from N- to C-terminal: i) a scFv domain; ii) a second domain linker; iii) a second variant Fc domain comprising CH2-CH3; wherein said scFv domain comprises a first variable heavy domain, an scFv linker and a first variable light domain; and c) a third monomer comprising a variant IL-15 domain; wherein said scFv domain binds human ICOS.

[0012] In some aspects, provided herein is a heterodimeric protein comprising: a) a first monomer comprising, from N- to C-terminal: i) a variant IL15 domain; ii) a first domain linker; iii) a first variant Fc domain comprising CH2-CH3; b) a second monomer comprising, from N- to C-terminal: i) a scFv domain; ii) a second domain linker; iii) a second variant Fc domain comprising CH2-CH3; wherein said scFv domain comprises a first variable heavy domain, an scFv linker and a first variable light domain; and c) a third monomer comprising an IL15Rα sushi domain; wherein said scFv domain binds human ICOS.

[0013] In certain aspects, provided herein is a heterodimeric protein comprising: a) a first monomer comprising, from N- to C-terminal: i) a variant IL-15Rα sushi domain with a cysteine residue; ii) a first domain linker; iii) a first variant Fc domain comprising CH2-CH3; b) a second monomer comprising, from N- to C-terminal: i) a scFv domain; ii) a second domain linker; iii) a second variant Fc domain comprising CH2-CH3; wherein said scFv domain comprises a first variable heavy domain, an scFv linker and a first variable light domain; and c) a third monomer comprising a variant IL-15 domain comprising a cysteine residue; wherein said variant IL-15Rα sushi domain and said variant IL-15 domain form a disulfide bond and said scFv domain binds human ICOS.

[0014] In other aspects, provided herein is a heterodimeric protein comprising: a) a first monomer comprising, from N- to C-terminal: i) a variant IL-15 domain with a cysteine residue; ii) a first domain linker; iii) a first variant Fc domain comprising CH2-CH3; b) a second monomer comprising, from N- to C-terminal: i) a scFv domain; ii) a second domain linker; iii) a second variant Fc domain comprising CH2-CH3; wherein said scFv domain comprises a first variable heavy domain, an scFv linker and a first variable light domain; and c) a third monomer comprising a variant IL-15Rα sushi domain comprising a cysteine residue; wherein said variant IL-15Rα sushi domain and said variant IL-15 domain form a disulfide bond and said scFv domain binds human ICOS.

[0015] In some aspects, provided herein is a heterodimeric protein comprising: a) a first monomer comprising, from N- to C-terminal: i) a variant IL15 domain; ii) a first domain linker; iii) an IL-15Rα sushi domain; iv) a second domain linker; v) a first variant Fc domain comprising CH2-CH3; b) a second monomer comprising a heavy chain comprising VH1-CH1-hinge-CH2-CH3, wherein said CH2-CH3 is a second variant Fc domain; and c) a light chain comprising VL-CL; wherein said VH1 and VL form an antigen binding domain that binds human ICOS.

[0016] In some aspects, provided herein is a heterodimeric protein comprising: a) a first monomer comprising, from N- to C-terminal: i) a variant IL15 domain; ii) a domain linker; iii) a first variant Fc domain comprising CH2-CH3; b) a second monomer comprising a heavy chain comprising VH1-CH1-hinge-CH2-CH3, wherein said CH2-CH3 is a second variant Fc domain; and c) a light chain comprising VL-CL; wherein said VH1 and VL form an antigen binding domain that binds human ICOS.

[0017] In some aspects, provided herein is a heterodimeric protein comprising: a) a first monomer comprising a heavy chain comprising VH1-CH1-hinge-CH2-CH3, wherein said CH2-CH3 is a first variant Fc domain; b) a second monomer comprising, from N- to C-terminal: i) an IL-15Rα sushi domain; ii) a domain linker; iii) a first variant Fc domain comprising CH2-CH3; c) a third monomer comprising a variant IL-15 domain; and d) a fourth monomer comprising a light chain comprising VL-CL; wherein said VH1 and VL form an antigen binding domain that binds human ICOS.

[0018] In certain aspects, provided herein is a heterodimeric protein comprising: a) a first monomer comprising a heavy chain comprising VH1-CH1-hinge-CH2-CH3, wherein said CH2-CH3 is a first variant Fc domain; b) a second monomer comprising, from N- to C-terminal: i) a variant IL-15 domain; ii) a domain linker; iii) a first variant Fc domain comprising CH2-CH3; c) a third monomer comprising an IL-15Rα sushi domain; and d) a fourth monomer comprising a light chain comprising VL-CL; wherein said VH1 and VL form an antigen binding domain that binds human ICOS.

[0019] In some aspects, provided herein is a heterodimeric protein comprising: a) a first monomer comprising a heavy chain comprising VH1-CH1-hinge-CH2-CH3, wherein said CH2-CH3 is a first variant Fc domain; b) a second monomer comprising, from N- to C-terminal: i) a variant IL-15Rα sushi domain with a cysteine residue; ii) a domain linker; iii) a first variant Fc domain comprising CH2-CH3; c) a third monomer comprising a variant IL-15 domain comprising a cysteine residue; and d) a fourth monomer comprising a light chain comprising VL-CL; wherein said variant IL-15Rα sushi domain and said variant IL-15 domain form a disulfide bond and said VH1 and VL form an antigen binding domain that binds human ICOS.

[0020] In some aspects, provided herein is a heterodimeric protein comprising: a) a first monomer comprising a heavy chain comprising VH1-CH1-hinge-CH2-CH3, wherein said CH2-CH3 is a first variant Fc domain; b) a second monomer comprising, from N- to C-terminal: i) a variant IL-15 domain with a cysteine residue; ii) a domain linker; iii) a first variant Fc domain comprising CH2-CH3; c) a third monomer comprising a variant IL-15Rα sushi domain comprising a cysteine residue; and d) a fourth monomer comprising a light chain comprising VL-CL; wherein said variant IL-15Rα sushi domain and said variant IL-15 domain form a disulfide bond and said VH1 and VL form an antigen binding domain that binds human ICOS.

[0021] In certain aspects, provided herein is a heterodimeric protein comprising: a) a first monomer comprising a heavy chain comprising VH1-CH1-hinge-CH2-CH3, wherein said CH2-CH3 is a first variant Fc domain; b) a second monomer comprising VH1-CH1-hinge-CH2-CH3-domain linker-IL-15Rα sushi domain-domain linker-IL-15 variant, wherein said CH2-CH3 is a second variant Fc domain; and c) a third monomer comprising a light chain comprising VL-CL; wherein said VH1 and VL form antigen binding domains that bind human ICOS.

[0022] In other aspects, provided herein is a heterodimeric protein comprising: a) a first monomer comprising a heavy chain comprising VH1-CH1-hinge-CH2-CH3, wherein said CH2-CH3 is a first variant Fc domain; b) a second monomer comprising VH1-CH1-hinge-CH2-CH3-domain linker-IL-15 variant-domain linker-IL15Rα sushi domain, wherein said CH2-CH3 is a second variant Fc domain; and c) a third monomer comprising a light chain comprising VL-CL; wherein said VH1 and VL form antigen binding domains that bind human ICOS.

[0023] In some aspects, provided herein is a heterodimeric protein comprising: a) a first monomer comprising a heavy chain comprising VH1-CH1-hinge-CH2-CH3, wherein said CH2-CH3 is a first variant Fc domain; b) a second monomer comprising VH1-CH1-hinge-CH2-CH3-domain linker-IL-15 variant, wherein said CH2-CH3 is a second variant Fc domain; c) a third monomer comprising a light chain comprising VL-CL; wherein said VH1 and VL form antigen binding domains that bind human ICOS.

[0024] In some aspects, provided herein is a heterodimeric protein comprising: a) a first monomer comprising a heavy chain comprising VH1-CH1-hinge-CH2-CH3, wherein said CH2-CH3 is a first variant Fc domain; b) a second monomer comprising VH1-CH1-hinge-CH2-CH3-domain linker-IL-15Rα sushi domain, wherein said CH2-CH3 is a second variant Fc domain; c) a third monomer comprising a variant IL-15 domain; and d) a fourth monomer comprising a light chain comprising VL-CL; wherein said VH1 and VL form antigen binding domains that bind human ICOS.

[0025] In other aspects, provided herein is a heterodimeric protein comprising: a) a first monomer comprising a heavy chain comprising VH1-CH1-hinge-CH2-CH3, wherein said CH2-CH3 is a first variant Fc domain; b) a second monomer comprising VH1-CH1-hinge-CH2-CH3-domain linker-IL-15 variant, wherein said CH2-CH3 is a second variant Fc domain; c) a third monomer comprising an IL-15Rα sushi domain; and d) a fourth monomer comprising a light chain comprising VL-CL; wherein said VH1 and VL form antigen binding domains that bind human ICOS.

[0026] In some aspects, provided herein is a heterodimeric protein comprising: a) a first monomer comprising a heavy chain comprising VH1-CH1-hinge-CH2-CH3-domain linker-IL-15Rα sushi domain, wherein said CH2-CH3 is a first variant Fc domain; b) a second monomer comprising VH1-CH1-hinge-CH2-CH3-domain linker-IL-15 variant, wherein said CH2-CH3 is a second variant Fc domain; and d) a third monomer comprising a light chain comprising VL-CL; wherein said VH1 and VL form antigen binding domains that bind human ICOS.

[0027] In certain aspects, provided herein is a heterodimeric protein comprising: a) a first monomer comprising a heavy chain comprising VH1-CH1-hinge-CH2-CH3, wherein said CH2-CH3 is a first variant Fc domain; b) a second monomer comprising VH1-CH1-hinge-CH2-CH3-domain linker-variant IL-15Rα sushi domain, wherein said variant IL-15Rα sushi domain comprises a cysteine residue wherein said CH2-CH3 is a second variant Fc domain; c) a third monomer comprising a variant IL-15 domain comprising a cysteine residue; and d) a fourth monomer comprising a light chain comprising VL-CL; wherein said variant IL-15Rα sushi domain and said variant IL-15 domain form a disulfide bond and said VH1 and VL form antigen binding domains that bind human ICOS.

[0028] In some aspects, provided herein is a heterodimeric protein comprising: a) a first monomer comprising a heavy chain comprising VH1-CH1-hinge-CH2-CH3, wherein said CH2-CH3 is a first variant Fc domain; b) a second monomer comprising VH1-CH1-hinge-CH2-CH3-domain linker-variant IL-15 domain, wherein said variant IL-15 domain comprises a cysteine residue wherein said CH2-CH3 is a second variant Fc domain; c) a third monomer comprising a variant IL-15Rα sushi domain comprising a cysteine residue; and d) a fourth monomer comprising a light chain comprising VL-CL; wherein said variant IL-15Rα sushi domain and said variant IL-15 domain form a disulfide bond and said VH1 and VL form antigen binding domains that bind human ICOS.

[0029] In some aspects, provided herein is a heterodimeric protein comprising: a) a first monomer comprising a heavy chain comprising VH1-CH1-hinge-CH2-CH3-domain linker-variant IL-15Rα sushi domain, wherein said variant IL-15Rα sushi domain comprises a cysteine residue wherein said CH2-CH3 is a first variant Fc domain; b) a second monomer comprising VH1-CH1-hinge-CH2-CH3-domain linker-IL-15 variant, wherein said variant IL-15 domain comprises a cysteine residue wherein said CH2-CH3 is a second variant Fc domain; and d) a third monomer comprising a light chain comprising VL-CL; wherein said variant IL-15Rα sushi domain and said variant IL-15 domain form a disulfide bond and said VH1 and VL form antigen binding domains that bind human ICOS.

[0030] In exemplary aspects, provided herein is a heterodimeric protein comprising: a) a first monomer comprising, from N- to C-terminal, a VH-CH1-domain linker-variant IL-15 domain-domain linker-CH2-CH3, wherein said CH2-CH3 is a first variant Fc domain; b) a second monomer comprising, from N- to C-terminal, a VH-CH1-domain linker-IL-15Rα sushi domain-domain linker-CH2-CH3, wherein said CH2-CH3 is a second variant Fc domain; and c) a third monomer comprising a light chain comprising VL-CL; wherein said VH and said VL form antigen binding domains that bind human ICOS.

[0031] In some aspects, provided herein is a heterodimeric protein comprising: a) a first monomer comprising, from N- to C-terminal, a VH-CH1-domain linker-variant IL-15 domain-domain linker-CH2-CH3, wherein said variant IL-15 domain comprises a cysteine residue wherein said CH2-CH3 is a first variant Fc domain; b) a second monomer comprising, from N- to C-terminal, a VH-CH1-domain linker-variant IL-15Rα sushi domain-domain linker-CH2-CH3, wherein said variant IL-15Rα sushi domain comprises a cysteine residue wherein said CH2-CH3 is a second variant Fc domain; and c) a third monomer comprising a light chain comprising VL-CL; wherein said variant IL-15Rα sushi domain and said variant IL-15 domain form a disulfide bond and said VH and said VL form antigen binding domains that bind human ICOS.

[0032] In some aspects, provided herein is a heterodimeric protein comprising: a) a first monomer comprising, from N- to C-terminal, a VH-CH1-domain linker-variant IL-15 domain-domain linker-CH2-CH3, wherein said CH2-CH3 is a first variant Fc domain; b) a second monomer comprising, from N- to C-terminal, a VH-CH1-domain linker-variant IL-15 domain-domain linker-CH2-CH3, wherein said CH2-CH3 is a second variant Fc domain; and c) a third monomer comprising a light chain comprising VL-CL; wherein said VH and said VL form antigen binding domains that bind human ICOS.

[0033] In certain aspects, provided herein is a heterodimeric protein comprising: a) a first monomer comprising from N- to C-terminal, VH-CH1-domain linker-IL-15Rα sushi domain-domain linker-variant IL-15 domain-domain linker-CH2-CH3, wherein said CH2-CH3 is a first variant Fc domain; b) a second monomer comprising a heavy chain comprising VH-CH1-hinge-CH2-CH3, wherein said CH2-CH3 is a second variant Fc domain; and c) a third monomer comprising a light chain comprising VL-CL; wherein said VH and said VL form antigen binding domains that bind human ICOS.

[0034] In other aspects, provided herein is a heterodimeric protein comprising: a) a first monomer comprising from N- to C-terminal, VH-CH1-domain linker-variant IL-15 domain-domain linker-IL-15Rα sushi domain-domain linker-CH2-CH3, wherein said CH2-CH3 is a first variant Fc domain; b) a second monomer comprising a heavy chain comprising VH-CH1-hinge-CH2-CH3, wherein said CH2-CH3 is a second variant Fc domain; and c) a third monomer comprising a light chain comprising VL-CL; wherein said VH and said VL form antigen binding domains that bind human ICOS.

[0035] In some aspects, provided herein is a heterodimeric protein comprising: a) a first monomer comprising from N- to C-terminal, VH-CH1-domain linker-variant IL-15 domain-domain linker-CH2-CH3, wherein said CH2-CH3 is a first variant Fc domain; b) a second monomer comprising a heavy chain comprising VH-CH1-hinge-CH2-CH3, wherein said CH2-CH3 is a second variant Fc domain; and c) a third monomer comprising a light chain comprising VL-CL; wherein said VH and said VL form antigen binding domains that bind human ICOS.

[0036] In some embodiments of the heterodimeric proteins described herein, the VH and VL are selected from the pairs selected from the group consisting of [ICOS]_H0 and [ICOS]L0 from FIG. 24; [ICOS]_H0.66 and [ICOS]_L0 from FIG. 24; Jmab-136[ICOS]vh and vl from FIG. 60; ICOS 314.8[ICOS]vh and vl from FIG. 60; H2L5[ICOS] vh and vl from FIG. 60; 37A10S713[ICOS] vh and vl from FIG. 60; C398.4A[ICOS] vh and vl from FIG. 60; ICOS.33[ICOS] vh and vl from FIG. 60; STIM001[ICOS] vh and vl from FIG. 60; and STIM003[ICOS] vh and vl from FIG. 60.

[0037] In exemplary embodiments of the heterodimeric proteins described herein, the first and the second Fc domains have a set of amino acid substitutions selected from the group consisting of S267K/L368D/K370S:S267K/S364K/E357Q; S364K/E357Q:L368D/K370S; L368D/K370S:S364K; L368E/K370S:S364K; T411E/K360E/Q362E:D401K; L368D/K370S:S364K/E357L; K370S:S364K/E357Q; T366S/L368A/Y407V:T366W; T366S/L368A/Y407V/Y349C:T366W/S354C; and T366S/L368A/Y407V/5354C:T366W/Y349C, according to EU numbering. In some embodiments, the first and the second Fc domains have S364K/E357Q:L368D/K370S.

[0038] In exemplary embodiments of the heterodimeric proteins described herein, the variant Fc domains each comprise M428L/N434S.

[0039] In some embodiments, of the heterodimeric proteins described herein, the variant Fc domains each comprise E233P/L234V/L235A/G236del/S267K.

[0040] In exemplary embodiments of the heterodimeric proteins described herein, the variant IL-15 domain comprises an amino acid substitution(s) selected from the group consisting of N1D, N4D, D8N, D30N, V49R, D61N, E64Q, N65D, N72D, Q108E, N4D/N65D, D30N/N65D, D30N/E64Q/N65D, N1G/D30N/E46G/V49R/E64Q, N1A/D30N/E46G/V49R, and D22N/Y26F/E46Q/E53Q/E89Q/E93Q.

[0041] In exemplary embodiments, the heterodimeric protein is selected from the group consisting of XENP29975, XENP29978, XENP30810, XENP30811, XENP30812 and XENP30813.

[0042] In other aspects, provided herein is a method of treating a patient in need thereof comprising administering to said patient any of the heterodimeric proteins or pharmaceutical compositions described herein.

[0043] In some aspects, provided herein is a fusion protein that includes an antigen binding domain that binds human ICOS; and an IL-15.

[0044] In some aspects, the present invention provides a method of treating a patient in need thereof comprising administering to the patient any one of the heterodimeric fusion proteins described herein or a pharmaceutical composition described herein. In some embodiments, the method of treating further comprising administering an antibody selected from the group consisting of an anti-PD-1 antibody, an anti-PD-L1 antibody, an anti-CTLA-4 antibody, an anti-TIM-3 antibody, an anti-LAG-3 antibody, or an anti-TIGIT antibody.

[0045] Nucleic acids, expression vectors and host cells are all provided as well, in addition to methods of making these proteins and treating patients with them.

### BRIEF DESCRIPTION OF THE DRAWINGS

[0046] FIG. 1 depicts the structure of IL-15 in complex with its receptors IL-15Rα (CD215), IL-15Rβ (CD122), and the common gamma chain (CD132).

[0047] FIGS. 2A-2B depict the sequences for IL-15 and its receptors.

[0048] FIG. 3 depicts the sequences for ICOS for both human and cynomolgus monkey to facilitate the development of antigen binding domains that bind to both for ease of clinical development.

[0049] FIGS. 4A-4F depict useful pairs of Fc heterodimerization variant sets (including skew and pI variants). There are variants for which there are no corresponding “monomer 2” variants; these are pI variants which can be used alone on either monomer.

[0050] FIG. 5 depict a list of isosteric variant antibody constant regions and their respective substitutions. pI_(−) indicates lower pI variants, while pI_(+) indicates higher pI variants. These can be optionally and independently combined with other heterodimerization variants of the inventions (and other variant types as well, as outlined herein.)

[0051] FIG. 6 depict useful ablation variants that ablate FcγR binding (sometimes referred to as “knock outs” or “KO” variants). Generally, ablation variants are found on both monomers, although in some cases they may be on only one monomer.

[0052] FIGS. 7A-7E shows particularly useful embodiments of “non-cytokine”/“non-Fv” components of the IL-15/Rα-Fc fusion proteins described herein.

[0053] FIGS. 8A-8F show particularly useful embodiments of “non-cytokine”/“non-Fv” components of the ICOS-targeted IL-15/Rα-Fc fusion proteins of the invention.

[0054] FIG. 9 depicts a number of exemplary variable length linkers (e.g., domain linkers) for use in IL-15/Rα-Fc fusion proteins. In some embodiments, these linkers find use linking the C-terminus of IL-15 and/or IL-15Rα(sushi) to the N-terminus of the Fc region. In some embodiments, these linkers find use fusing IL-15 (including the IL-15 variant) to the IL-15Rα(sushi).

[0055] FIG. 10 depicts a number of charged scFv linkers that find use in increasing or decreasing the pI of heterodimeric antibodies that utilize one or more scFv as a component. The (+H) positive linker finds particular use herein. A single prior art scFv linker with single charge is referenced as “Whitlow”, from Whitlow et al., Protein Engineering 6(8):989-995 (1993). It should be noted that this linker was used for reducing aggregation and enhancing proteolytic stability in scFvs.

[0056] FIGS. 11A-11D depict the sequences of several useful IL-15/Rα-Fc format backbones based on human IgG1, without the cytokine sequences (e.g., the IL-15 and/or IL-15Rα(sushi)). It is important to note that these backbones can also find use in certain embodiments of ICOS-targeted IL-15/Rα-Fc fusion proteins. Backbone 1 is based on human IgG1 (356E/358M allotype), and includes C220S on both chains, the S364K/E357Q:L368D/K370S skew variants, the Q295E/N384D/Q418E/N421D pI variants on the chain with L368D/K370S skew variants and the E233P/L234V/L235A/G236del/S267K ablation variants on both chains. Backbone 2 is based on human IgG1 (356E/358M allotype), and includes C220S on both chains, the S364K:L368D/K370S skew variants, the Q295E/N384D/Q418E/N421D pI variants on the chain with L368D/K370S skew variants and the E233P/L234V/L235A/G236del/S267K ablation variants on both chains. Backbone 3 is based on human IgG1 (356E/358M allotype), and includes C220S on both chains, the S364K:L368E/K370S skew variants, the Q295E/N384D/Q418E/N421D pI variants on the chain with L368E/K370S skew variants and the E233P/L234V/L235A/G236del/S267K ablation variants on both chains. Backbone 4 is based on human IgG1 (356E/358M allotype), and includes C220S on both chains, the D401K:K360E/Q362E/T411E skew variants, the Q295E/N384D/Q418E/N421D pI variants on the chain with K360E/Q362E/T411E skew variants and the E233P/L234V/L235A/G236del/S267K ablation variants on both chains. Backbone 5 is based on human IgG1 (356D/358L allotype), and includes C220S on both chains, the S364K/E357Q:L368D/K370S skew variants, the Q295E/N384D/Q418E/N421D pI variants on the chain with L368D/K370S skew variants and the E233P/L234V/L235A/G236del/S267K ablation variants on both chains. Backbone 6 is based on human IgG1 (356E/358M allotype), and includes C220S on both chains, the S364K/E357Q:L368D/K370S skew variants, Q295E/N384D/Q418E/N421D pI variants on the chain with L368D/K370S skew variants and the E233P/L234V/L235A/G236del/S267K ablation variants on both chains, as well as an N297A variant on both chains. Backbone 7 is identical to 6 except the mutation is N297S. Alternative formats for backbones 6 and 7 can exclude the ablation variants E233P/L234V/L235A/G236del/S267K in both chains. Backbone 8 is based on human IgG4, and includes the S364K/E357Q:L368D/K370S skew variants, the Q295E/N384D/Q418E/N421D pI variants on the chain with L368D/K370S skew variants, as well as a S228P (EU numbering, this is S241P in Kabat) variant on both chains that ablates Fab arm exchange as is known in the art. Backbone 9 is based on human IgG2, and includes the S364K/E357Q:L368D/K370S skew variants, the Q295E/N384D/Q418E/N421D pI variants on the chain with L368D/K370S skew variants. Backbone 10 is based on human IgG2, and includes the S364K/E357Q:L368D/K370S skew variants, the Q295E/N384D/Q418E/N421D pI variants on the chain with L368D/K370S skew variants as well as a S267K variant on both chains. Backbone 11 is identical to backbone 1, except it includes M428L/N434S Xtend mutations. Backbone 12 is based on human IgG1 (356E/358M allotype), and includes C220S on both identical chains, the E233P/L234V/L235A/G236del/S267K ablation variants on both identical chains. Backbone 13 is based on human IgG1 (356E/358M allotype), and includes C220S on both chains, the S364K/E357Q:L368D/K370S skew variants, the P217R/P229R/N276K pI variants on the chain with S364K/E357Q skew variants and the E233P/L234V/L235A/G236del/S267K ablation variants on both chains.

[0057] As will be appreciated by those in the art and outlined below, these sequences can be used with any IL-15 and IL-15Rα(sushi) pairs outlined herein, including but not limited to IL-15/Rα-heteroFc, ncIL-15/Rα, and scIL-15/Rα, as schematically depicted in FIG. 14A-FIG. 14G. Additionally, any IL-15 and/or IL-15Rα(sushi) variants can be incorporated into these FIG. 11 backbones in any combination.

[0058] Included within each of these backbones are sequences that are 90%, 91%, 92%, 93%, 94%, 95%, 96%, 97%, 98%, and 99% identical (as defined herein) to the recited sequences, and/or contain from 1, 2, 3, 4, 5, 6, 7, 8, 9 or 10 additional amino acid substitutions (as compared to the “parent” of the Figure, which, as will be appreciated by those in the art, already contain a number of amino acid modifications as compared to the parental human IgG1 (or IgG2 or IgG4, depending on the backbone). That is, the recited backbones may contain additional amino acid modifications (generally amino acid substitutions) in addition to the skew, pI and ablation variants contained within the backbones of this figure.

[0059] FIG. 12 shows the sequences of several useful ICOS-targeted IL-15/Rα-Fc fusion format backbones based on human IgG1, without the cytokine sequences (e.g. the Il-15 and/or IL-15Rα(sushi)) or VH, and further excluding cognate light chain backbones which are depicted in FIG. 13. Backbone 1 is based on human IgG1 (356E/358M allotype), and includes the S364K/E357Q:L368D/K370S skew variants, C220S and the Q295E/N384D/Q418E/N421D pI variants on the chain with L368D/K370S skew variants and the E233P/L234V/L235A/G236del/S267K ablation variants on both chains. Backbone 2 is based on human IgG1 (356E/358M allotype), and includes the S364K/E357Q:L368D/K370S skew variants, the N208D/Q295E/N384D/Q418E/N421D pI variants on the chain with L368D/K370S skew variants, C220S in the chain with S364K/E357Q variants, and the E233P/L234V/L235A/G236del/S267K ablation variants on both chains. Backbone 3 is based on human IgG1 (356E/358M allotype), and includes the S364K/E357Q:L368D/K370S skew variants, the N208D/Q295E/N384D/Q418E/N421D pI variants on the chains with L368D/K370S skew variants, the Q196K/I199T/P217R/P228R/N276K pI variants on the chains with S364K/E357Q variants, and the E233P/L234V/L235A/G236del/S267K ablation variants on both chains.

[0060] In certain embodiments, these sequences can be of the 356D/358L allotype. In other embodiments, these sequences can include either the N297A or N297S substitutions. In some other embodiments, these sequences can include the M428L/N434S Xtend mutations. In yet other embodiments, these sequences can instead be based on human IgG4, and include a S228P (EU numbering, this is S241P in Kabat) variant on both chains that ablates Fab arm exchange as is known in the art. In yet further embodiments, these sequences can instead be based on human IgG2. Further, these sequences may instead utilize the other skew variants, pI variants, and ablation variants depicted in FIG. 4 to FIG. 6.

[0061] As will be appreciated by those in the art and outlined below, these sequences can be used with any IL-15 and IL-15Rα(sushi) pairs outlined herein, including but not limited to scIL-15/Rα, ncIL-15/Rα, and dsIL-15Rα, as schematically depicted in FIG. 32A-FIG. 32H. Further as will be appreciated by those in the art and outlined below, any IL-15 and/or IL-15Rα(sushi) variants can be incorporated in these backbones. Furthermore as will be appreciated by those in the art and outlined below, these sequences can be used with any VH and VL pairs outlined herein, including either a scFv or a Fab.

[0062] Included within each of these backbones are sequences that are 90, 95, 98 and 99% identical (as defined herein) to the recited sequences, and/or contain from 1, 2, 3, 4, 5, 6, 7, 8, 9 or 10 additional amino acid substitutions (as compared to the “parent” of the Figure, which, as will be appreciated by those in the art, already contain a number of amino acid modifications as compared to the parental human IgG1 (or IgG2 or IgG4, depending on the backbone). That is, the recited backbones may contain additional amino acid modifications (generally amino acid substitutions) in addition to the skew, pI and ablation variants contained within the backbones of this figure.

[0063] FIG. 13 depicts the “non-Fv” backbone of cognate light chains (i.e. constant light chain) which find use in ICOS-targeted IL-15/Rα-Fc fusion proteins of the invention.

[0064] FIGS. 14A-14G depict several formats for the IL-15/Rα-Fc fusion proteins of the present invention. IL-15Rα Heterodimeric Fc fusion or “IL-15/Rα-heteroFc” (FIG. 14A) comprises IL-15 (including an IL-15 variant) recombinantly fused to one side of a heterodimeric Fc and IL-15Rα(sushi) recombinantly fused to the other side of a heterodimeric Fc. The IL-15 and IL-15Rα(sushi) may have a variable length Gly-Ser linker between the C-terminus and the N-terminus of the Fc region. Single-chain IL-15/Rα-Fc fusion or “scIL-15/Rα-Fc” (FIG. 14B) comprises IL-15Rα(sushi) fused to IL-15 by a variable length linker (termed a “single-chain” IL-15/IL-15Rα(sushi) complex or “scIL-15/Rα”) which is then fused to the N-terminus of a heterodimeric Fc-region, with the other side of the molecule being “Fc-only” or “empty Fc”. Non-covalent IL-15/Rα-Fc or “ncIL-15/Rα-Fc” (FIG. 14C) comprises IL-15Rα(sushi) fused to a heterodimeric Fc region, while IL-15 is transfected separately so that a non-covalent IL-15/Rα complex is formed, with the other side of the molecule being “Fc-only” or “empty Fc”. Bivalent non-covalent IL-15/Rα-Fc fusion or “bivalent ncIL-15/Rα-Fc” (FIG. 14D) comprises IL-15Rα(sushi) fused to the N-terminus of a homodimeric Fc region, while IL-15 is transfected separately so that a non-covalent IL-15/Rα complex is formed. Bivalent single-chain IL-15/Rα-Fc fusion or “bivalent scIL-15/Rα-Fc” (FIG. 14E) comprises IL-15 fused to IL-15Rα(sushi) by a variable length linker (termed a “single-chain” IL-15/IL-15Rα(sushi) complex or “scIL-15/Rα”) which is then fused to the N-terminus of a homodimeric Fc-region. Fc-non-covalent IL-15/Rα fusion or “Fc-ncIL-15/Rα” (FIG. 14F) comprises IL-15Rα(sushi) fused to the C-terminus of a heterodimeric Fc region, while IL-15 is transfected separately so that a non-covalent IL-15/Rα complex is formed, with the other side of the molecule being “Fc-only” or “empty Fc”. Fc-single-chain IL-15/Rα fusion or “Fc-scIL-15/Rα” (FIG. 14G) comprises IL-15 fused to IL-15Rα(sushi) by a variable length linker (termed a “single-chain” IL-15/IL-15Rα(sushi) complex or “scIL-15/Rα”) which is then fused to the C-terminus of a heterodimeric Fc region, with the other side of the molecule being “Fc-only” or “empty Fc”.

[0065] FIG. 15 depicts sequences of illustrative IL-15/Rα-Fc fusion proteins of the “IL-15/Rα-heteroFc” format. IL-15 and IL-15Rα(sushi) are underlined, linkers are double underlined (although as will be appreciated by those in the art, the linkers can be replaced by other linkers, some of which are depicted in FIG. 7), and slashes (/) indicate the border(s) between IL-15, IL-15Rα, linkers, and Fc regions.

[0066] FIG. 16 depicts sequences of illustrative IL-15/Rα-Fc fusion proteins of the “scIL-15/Rα-Fc” format. IL-15 and IL-15Rα(sushi) are underlined, linkers are double underlined (although as will be appreciated by those in the art, the linkers can be replaced by other linkers, some of which are depicted in FIG. 7), and slashes (/) indicate the border(s) between IL-15, IL-15Rα, linkers, and Fc regions.

[0067] FIG. 17 depicts sequences of illustrative IL-15/Rα-Fc fusion proteins of the “ncIL-15/Rα-Fc” format. IL-15 and IL-15Rα(sushi) are underlined, linkers are double underlined (although as will be appreciated by those in the art, the linkers can be replaced by other linkers, some of which are depicted in FIG. 7), and slashes (/) indicate the border(s) between IL-15, IL-15Rα, linkers, and Fc regions.

[0068] FIGS. 18A-18C depict the induction of A) NK (CD56⁺/CD16⁺) cells, B) CD4⁺ T cells, and C) CD8⁺ T cells proliferation by illustrative IL-15/Rα-Fc fusion proteins of scIL-15/Rα-Fc format (XENP21478) and ncIL-15/Rα-Fc format (XENP21479) based on Ki67 expression as measured by FACS.

[0069] FIG. 19 depicts the structure of IL-15 complexed with IL-15Rα, IL-2Rβ, and common gamma chain. Locations of substitutions designed to reduce potency are shown.

[0070] FIGS. 20A-20D depict sequences for illustrative IL-15 variants engineered with the aim to reduce potency. Included within each of these variant IL-15 sequences are sequences that are 90, 95, 98 and 99% identical (as defined herein) to the recited sequences, and/or contain from 1, 2, 3, 4, 5, 6, 7, 8, 9 or 10 additional amino acid substitutions. As will be clear to those skilled in the art, the IL-15 variants can be used in any of the IL-15/Rα-Fc fusion and ICOS-targeted IL-15/Rα-Fc fusion proteins described herein.

[0071] FIGS. 21A-21B depicts sequences of illustrative IL-15/Rα-Fc fusion proteins of the “scIL-15/Rα-Fc” format comprising IL-15 variants engineered with the aim to reduce potency. IL-15 and IL-15Rα(sushi) are underlined, linkers are double underlined (although as will be appreciated by those in the art, the linkers can be replaced by other linkers, some of which are depicted in FIG. 9), and slashes (/) indicate the border(s) between IL-15, IL-15Rα, linkers, and Fc regions.

[0072] FIGS. 22A-22G depict percentage of A) CD4+CD45RA−, B) CD4+CD45RA+, C) CD8+CD45RA−, D) CD8+CD45RA+, E) CD16+NK cells, F) CD56+NK cells, and G) γδ cells expression Ki67 following incubation with the indicated test articles.

[0073] FIGS. 23A-23B depict A) natural transpresentation of IL-15:IL-15Rα complex and costimulation ligand (e.g. ICOS-L) to T cells, and B) the analogous presentation of IL-15:IL-15Rα and costimulation by the ICOS-targeted IL-15/Rα-Fc fusion proteins of the invention.

[0074] FIG. 24 depicts the variable heavy and variable light chains for illustrative ICOS antigen binding domains (ABD. The variable heavy chains, variable light chains, and six CDRs of such ABDs find use in the fusion proteins provided herein. The CDRs are underlined. As noted herein and is true for every sequence herein containing CDRs, the exact identification of the CDR locations may be slightly different depending on the numbering used as is shown in Table 1, and thus included herein are not only the CDRs that are underlined but also CDRs included within the VH and VL domains using other numbering systems.

[0075] FIGS. 25A-25CC depict several formats for the ICOS-targeted IL-15/Rα-Fc fusion proteins of the present invention. The “scIL15Rα-IL15-Fc x scFv-Fc” format (FIG. 25A) comprises two monomers—the first monomer comprises, from N- to C-terminus, the IL-15Rα(sushi) domain-(domain linker)-IL-15 variant-(domain linker)-CH2-CH3 (with the second domain linker frequently being a hinge domain); and the second monomer comprises VH-scFv linker-VL-hinge-CH2-CH3 or VL-scFv linker-VH-hinge-CH2-CH3, although in either orientation a domain linker can be substituted for the hinge. The “scIL15-IL15Rα-Fc x scFv-Fc” format (FIG. 25B) comprises two monomers—the first monomer comprises, from N- to C-terminus, the IL-15 variant-(domain linker)-IL-15Rα(sushi) domain-(domain linker)-CH2-CH3 (with the second domain linker frequently being a hinge domain); and the second monomer comprises VH-scFv linker-VL-hinge-CH2-CH3 or VL-scFv linker-VH-hinge-CH2-CH3, although in either orientation a domain linker can be substituted for the hinge. The “IL15-Fc x scFv-Fc” format (FIG. 25C) comprises two monomers—the first monomer comprises, from N- to C-terminus, the IL-15 variant-(domain linker)-CH2-CH3 (with the second domain linker frequently being a hinge domain), and the second monomer comprises VH-scFv linker-VL-hinge-CH2-CH3 or VL-scFv linker-VH-hinge-CH2-CH3, although in either orientation a domain linker can be substituted for the hinge. The “ncIL15+IL15Rα-Fc x scFv-Fc” format (FIG. 25D) comprises three monomers—the first monomer comprises, from N- to C-terminus, the IL-15Rα(sushi) domain-domain linker-CH2-CH3; the second monomer comprises vh-scFv linker-vl-hinge-CH2-CH3 or vl-scFv linker-vh-hinge-CH2-CH3, although in either orientation a domain linker can be substituted for the hinge; the third monomer is the variant IL-15 domain that self-assembles with the IL-15Rα(sushi) domain. The “ncIL15Rα+IL15-Fc x scFv-Fc” format (FIG. 25E) comprises three monomers—the first monomer comprises, from N- to C-terminus, a variant IL15-domain linker-CH2-CH3; the second monomer comprises vh-scFv linker-vl-hinge-CH2-CH3 or vl-scFv linker-vh-hinge-CH2-CH3, although in either orientation a domain linker can be substituted for the hinge; and the third monomer is the IL-15Rα(sushi) domain that self-assembles with the IL-15. The “dsIL15+IL15Rα-Fc x scFv-Fc” format (FIG. 25F) comprises three monomers—the first monomer comprises, from N- to C-terminus, the a variant IL-15Rα(sushi) domain-domain linker-CH2-CH3, wherein the variant IL-15Rα(sushi) domain has an engineered cysteine residue; the second monomer comprises vh-scFv linker-vl-hinge-CH2-CH3 or vl-scFv linker-vh-hinge-CH2-CH3, although in either orientation a domain linker can be substituted for the hinge; and the third monomer is the variant IL-15 domain, also engineered to have a cysteine variant amino acid, thus allowing a disulfide bridge to form between the IL-15Rα(sushi) domain and the variant IL-15 domain. The “dsIL15Rα+IL15-Fc x scFv-Fc” format (FIG. 25G) comprises three monomers—the first monomer comprises, from N- to C-terminus, a variant IL-15-domain linker-CH2-CH3, wherein the variant IL-15 has an engineered cysteine residue; the second monomer comprises vh-scFv linker-vl-hinge-CH2-CH3 or vl-scFv linker-vh-hinge-CH2-CH3, although in either orientation a domain linker can be substituted for the hinge; and the third monomer is a variant IL-15Rα(sushi) domain, also engineered to have a cysteine variant amino acid, thus allowing a disulfide bridge to form between the IL-15Rα(sushi) domain and the variant IL-15. The “scIL15Rα-IL15-Fc x Fab-Fc” format (FIG. 25H) comprises three monomers—the first monomer comprises, from N- to C-terminus, the IL-15Rα(sushi) domain-domain linker-variant IL-15-domain linker-CH2-CH3; the second monomer comprises a heavy chain, VH-CH1-hinge-CH2-CH3; and the third monomer is a light chain, VL-CL. The “scIL15-IL15Rα-Fc x Fab-Fc” format (FIG. 25I) comprises three monomers—the first monomer comprises, from N- to C-terminus, a variant IL-15-domain linker-IL-15Rα(sushi) domain-domain linker-CH2-CH3; the second monomer comprises a heavy chain, VH-CH1-hinge-CH2-CH3; and the third monomer is a light chain, VL-CL. The “IL15-Fc x Fab-Fc” format (FIG. 25J) comprises three monomers—the first monomer comprises, from N- to C-terminus, a variant IL-15-domain linker-CH2-CH3; the second monomer comprises a heavy chain, VH-CH1-hinge-CH2-CH3; and the third monomer is a light chain, VL-CL. The “ncIL15+IL15Rα-Fc x Fab-Fc” format (FIG. 25K) comprises three monomers—the first monomer comprises, from N- to C-terminus, the IL-15Rα(sushi) domain-domain linker-CH2-CH3; the second monomer comprises a heavy chain, VH-CH1-hinge-CH2-CH3; and the third monomer is the variant IL-15 domain that self-assembles with the IL-15. The “ncIL15Rα+IL15-Fc x Fab-Fc” format (FIG. 25L) comprises three monomers—the first monomer comprises, from N- to C-terminus, the variant IL-15-domain linker-CH2-CH3; the second monomer comprises a heavy chain, VH-CH1-hinge-CH2-CH3; and the third monomer is the IL-15Rα(sushi) domain that self-assembles with the IL-15. The “dsIL15+IL15Rα-Fc x Fab-Fc” format (FIG. 25M) comprises three monomers—the first monomer comprises, from N- to C-terminus, the a variant IL-15Rα(sushi)domain-domain linker-CH2-CH3, wherein the variant IL-15Rα(sushi)domain has been engineered to contain a cysteine residue; the second monomer comprises a heavy chain, VH-CH1-hinge-CH2-CH3; and the third monomer is the variant IL-15 domain, also engineered to have a cysteine residue, such that a disulfide bridge is formed under physiological or native cellular conditions. The “dsIL15Rα+IL15-Fc x Fab-Fc” format (FIG. 25N) comprises three monomers—the first monomer comprises, from N- to C-terminus, a variant IL-15-domain linker-CH2-CH3, wherein the variant IL-15 has been engineered to contain a cysteine residue; the second monomer comprises a heavy chain, VH-CH1-hinge-CH2-CH3; and the third monomer is the variant IL-15Rα(sushi) domain, also engineered to have a cysteine residue, such that a disulfide bridge is formed under physiological or native cellular conditions. The “Fab-Fc-scIL15Rα-IL15 x Fab-Fc” format (FIG. 25O) comprises three monomers (although the fusion protein is a tetramer)—the first monomer comprises a heavy chain, VH-CH1-hinge-CH2-CH3; the second monomer comprises a heavy chain with a C-terminal scIL15Rα-IL15 scIL-15 complex e.g. VH-CH1-hinge-CH2-CH3-domain linker-IL-15Rα(sushi)domain-domain linker-IL-15 variant; and the third (and fourth) monomer are light chains, VL-CL. The “Fab-Fc-scIL15-IL15Rα x Fab-Fc” format (FIG. 25P) comprises three monomers (although the fusion protein is a tetramer)—the first monomer comprises a heavy chain, VH-CH1-hinge-CH2-CH3; the second monomer comprises a heavy chain with a C-terminal scIL15-IL15Rα complex e.g. VH-CH1-hinge-CH2-CH3-domain linker-IL-15 variant-domain linker-IL-15Rα(sushi) domain; and the third (and fourth) monomer are light chains, VL-CL. The “Fab-Fc-IL15 x Fab-Fc” format (FIG. 25Q) comprises three monomers (although the fusion protein is a tetramer)—the first monomer comprises a heavy chain, VH-CH1-hinge-CH2-CH3; the second monomer comprises a heavy chain with a C-terminal IL15 i.e. VH-CH1-hinge-CH2-CH3-domain linker-IL-15 variant; and the third (and fourth) monomer are light chains, VL-CL. A similar format not shown here which may be referred to as the “Fab-Fc-IL15 x Fab-Fc-IL15” format has a C-terminal IL15 on the first monomer e.g. VH-CH1-hinge-CH2-CH3-domain linker IL-15 variant. The “Fab-Fc-IL15Rα+ncIL15 x Fab-Fc” format (FIG. 25R) comprises four monomers (although the heterodimeric fusion protein is a pentamer)—the first monomer comprises a heavy chain, VH-CH1-hinge-CH2-CH3; the second monomer comprises a heavy chain with a C-terminal IL-15Rα(sushi) domain e.g. VH-CH1-hinge-CH2-CH3-domain linker-IL-15Rα(sushi) domain; the third monomer is a variant IL-15 domain; and the fourth (and fifth) monomer are light chains, VL-CL. The “Fab-Fc-IL15+ncIL15Rα x Fab-Fc” format (FIG. 25S) comprises four monomers (although the heterodimeric fusion protein is a pentamer)—the first monomer comprises a heavy chain, VH-CH1-hinge-CH2-CH3; the second monomer comprises a heavy chain with a C-terminal variant IL-15 e.g. VH-CH1-hinge-CH2-CH3-domain linker-IL-15; the third monomer is a IL-15Rα(sushi) domain; and the fourth (and fifth) monomer are light chains, VL-CL. The “Fab-Fc-IL15 x Fab-Fc-IL15Rα” format (FIG. 25T) comprises three monomers (although the fusion protein is a tetramer)—the first monomer comprises a heavy chain with a C-terminal variant IL-15 e.g. VH-CH1-hinge-CH2-CH3-domain linker-IL-15; the second monomer comprises a heavy chain with a C-terminal IL15Rα(sushi) domain e.g. VH-CH1-hinge-CH2-CH3-domain linker-IL-15Rα(sushi) domain; and the third (and fourth) monomer are light chains, VL-CL. The “Fab-Fc-IL15Rα+dsIL15 x Fab-Fc” format (FIG. 25U) comprises four monomers (although the heterodimeric fusion protein is a pentamer)—the first monomer comprises a heavy chain, VH-CH1-hinge-CH2-CH3; the second monomer comprises a heavy chain with a C-terminal variant IL-15Rα(sushi) domain e.g., VH-CH1-hinge-CH2-CH3-domain linker-IL-15Rα(sushi) domain, where the IL-15Rα(sushi) domain has been engineered to contain a cysteine residue; the third monomer is a variant IL-15 domain, which has been engineered to contain a cysteine residue, such that the IL-15 complex is formed under physiological conditions; and the fourth (and fifth) monomer are light chains, VL-CL. The “Fab-Fc-IL15+dsIL15Rα x Fab-Fc” format (FIG. 25V) comprises four monomers (although the heterodimeric fusion protein is a pentamer)—the first monomer comprises a heavy chain, VH-CH1-hinge-CH2-CH3; the second monomer comprises a heavy chain with a C-terminal variant IL-15 domain e.g. VH-CH1-hinge-CH2-CH3-domain linker-IL-15 domain, where the variant IL-15 domain has been engineered to contain a cysteine residue; the third monomer is a variant IL-15Rα(sushi) domain, which has been engineered to contain a cysteine residue, such that the IL-15 complex is formed under physiological conditions; and the fourth (and fifth) monomer are light chains, VL-CL. The “Fab-Fc-IL15 x Fab-Fc-IL15Rα w/ ds” format (FIG. 25W) comprises three monomers (although the fusion protein is a tetramer)—the first monomer comprises a heavy chain with a C-terminal variant IL-15 e.g. VH-CH1-hinge-CH2-CH3-domain linker-IL-15, where the variant IL-15 domain has been engineered to contain a cysteine residue; the second monomer comprises a heavy chain with a C-terminal variant IL15Rα(sushi) domain e.g. VH-CH1-hinge-CH2-CH3-domain linker-IL-15Rα(sushi) domain, which has been engineered to contain a cysteine residue, such that the IL-15 complex is formed under physiological conditions; and the third (and fourth) monomer are light chains, VL-CL. The “Fab-Fc-IL15-Fc x Fab-IL15Rα-Fc” format (FIG. 25X) comprises four monomers forming a tetramer—The first monomer comprises a VH-CH1-[optional domain linker]-IL-15 variant-[optional domain linker]-CH2-CH3, with the second optional domain linker sometimes being the hinge domain; the second monomer comprises a VH-CH1-[optional domain linker]-IL-15Rα(sushi) domain-[optional domain linker]-CH2-CH3, with the second optional domain linker sometimes being the hinge domain; and the third (and fourth) monomers are light chains, VL-CL. The “Fab-Fc-IL15-Fc x Fab-IL15Rα-Fc w/ ds” format (FIG. 25Y) comprises four monomers forming a tetramer—the first monomer comprises a VH-CH1-[optional domain linker]-IL-15 variant-[optional domain linker]-CH2-CH3, with the second optional domain linker sometimes being the hinge domain, where the variant IL-15 domain has been engineered to contain a cysteine residue; the second monomer comprises a VH-CH1-[optional domain linker]-IL-15Rα(sushi) domain-[optional domain linker]-CH2-CH3, with the second optional domain linker sometimes being the hinge domain, where the variant IL-15Rα(sushi) has been engineered to contain a cysteine residue, such that the IL-15 complex is formed under physiological conditions; and the third (and fourth) monomers are light chains, VL-CL. The “Fab-IL15-Fc x Fab-IL15-Fc” format (FIG. 25Z) comprises four monomers forming a tetramer—the first and second monomer comprises a VH-CH1-[optional domain linker]-IL-15 variant-[optional domain linker]-CH2-CH3, with the second optional domain linker sometimes being the hinge domain; and the third (and fourth) monomers are light chains, VL-CL. The “Fab-scIL15Rα-IL15-Fc x Fab-Fc” format (FIG. 25AA) comprises four monomers forming a tetramer—the first monomer comprises a VH-CH1-[optional domain linker]-IL-15Rα(sushi) domain-domain linker-IL-15 variant-[optional domain linker]-CH2-CH3, with the second optional domain linker sometimes being the hinge domain; the second monomer comprises a VH-CH1-hinge-CH2-CH3; and the third (and fourth) monomers are light chains, VL-CL. The “Fab-scIL15-IL15Rα-Fc x Fab-Fc” format (FIG. 25BB) comprises four monomers forming a tetramer—the first monomer comprises a VH-CH1-[optional domain linker]-IL-15 variant-domain linker-IL-15Rα(sushi) domain-[optional domain linker]-CH2-CH3, with the second optional domain linker sometimes being the hinge domain; the second monomer comprises a VH-CH1-hinge-CH2-CH3; and the third (and fourth) monomers are light chains, VL-CL. The “Fab-IL15-Fc x Fab-Fc” format (FIG. 25CC) comprises four monomers forming a tetramer—the first monomer comprises a VH-CH1-[optional domain linker]-IL-15 variant-[optional domain linker]-CH2-CH3, with the second optional domain linker sometimes being the hinge domain; the second monomer comprises a VH-CH1-hinge-CH2-CH3; and the third (and fourth) monomers are light chains, VL-CL.

[0076] FIGS. 26A-26D depict sequences of illustrative ICOS-targeted IL-15/Rα-Fc fusion proteins of the “scIL-15/Rα x Fab” format. The CDRs are in bold. As noted herein and is true for every sequence herein containing CDRs, the exact identification of the CDR locations may be slightly different depending on the numbering used as is shown in Table 1, and thus included herein are not only the CDRs that are underlined but also CDRs included within the VH and VL domains using other numbering systems. IL-15 and IL-15Rα(sushi) are underlined, linkers are double underlined (although as will be appreciated by those in the art, the linkers can be replaced by other linkers, some of which are depicted in FIGS. 9 and 10), and slashes (/) indicate the border(s) between IL-15, IL-15Rα, linkers, variable regions, and constant/Fc regions.

[0077] FIGS. 27A-27B depict the sequences of XENP26007 and XENP29481, a control RSV-targeted IL-15/Rα-Fc fusion. The CDRs are underlined. As noted herein and is true for every sequence herein containing CDRs, the exact identification of the CDR locations may be slightly different depending on the numbering used as is shown in Table 1, and thus included herein are not only the CDRs that are underlined but also CDRs included within the VH and VL domains using other numbering systems. IL-15 and IL-15Rα(sushi) are italicized, linkers are double underlined (although as will be appreciated by those in the art, the linkers can be replaced by other linkers, some of which are depicted in FIGS. 9 and 10), and slashes (/) indicate the border(s) between IL-15, IL-15Rα, linkers, variable regions, and constant/Fc regions. As will be clear to those skilled in the art, each of the ICOS-targeted IL-15/Rα-Fc fusion proteins described can also include Xtend Fc (M428L/N434S).

[0078] FIGS. 28A-28B depict induction of A) CD8+ T cells and B) CD4+ T cells proliferation by ICOS-targeted IL-15/Rα-Fc fusions (and controls) as indicated by percentage proliferating cells (determined based on CFSE dilution). The data show that ICOS-targeted IL-15/Rα-Fc fusions are much more potent in inducing proliferation of both CD8+ and CD4+ T cells in comparison to untargeted IL-15/Rα-Fc fusion (as well as control RSV-targeted IL-15/Rα-Fc fusion). Experiment was performed using human PBMCs from donor 1.

[0079] FIGS. 29A-29B depict induction of A) CD8⁺CD45RA⁻ T cells and B) CD8⁺CD45RA⁺ T cells proliferation by ICOS-targeted IL-15/Rα-Fc fusions (and controls) as indicated by percentage proliferating cells (determined based on CFSE dilution). Experiment was performed using human PBMCs from donor 2.

[0080] FIGS. 30A-30B depict induction of A) CD8⁺CD45RA⁻ T cells and B) CD8⁺CD45RA⁺ T cells proliferation by ICOS-targeted IL-15/Rα-Fc fusions (and controls) as indicated by percentage proliferating cells (determined based on CFSE dilution). The data show that ICOS-targeted IL-15/Rα-Fc fusions are much more potent in inducing proliferation of CD8⁺CD45RA⁻ T cells in comparison to untargeted IL-15/Rα-Fc fusion (as well as control RSV-targeted IL-15/Rα-Fc fusion). Experiment was performed using human PBMCs from donor 1.

[0081] FIGS. 31A-31B depict induction of A) CD8⁺CD45RA⁻ T cells and B) CD8⁺CD45RA⁺ T cells proliferation by ICOS-targeted IL-15/Rα-Fc fusions (and controls) as indicated by cell counts. The data show that ICOS-targeted IL-15/Rα-Fc fusions are much more potent in inducing proliferation of CD8⁺CD45RA⁻ T cells in comparison to untargeted IL-15/Rα-Fc fusion (as well as control RSV-targeted IL-15/Rα-Fc fusion). Experiment was performed using human PBMCs from donor 1.

[0082] FIGS. 32A-32B depict induction of A) CD8⁺CD45RA⁻ T cells and B) CD8⁺CD45RA⁺ T cells proliferation by ICOS-targeted IL-15/Rα-Fc fusions (and controls) as indicated by cell counts. Experiment was performed using human PBMCs from donor 2.

[0083] FIGS. 33A-33B depict induction of A) CD4⁺CD45RA⁻ T cells and B) CD4⁺CD45RA⁺ T cells proliferation by ICOS-targeted IL-15/Rα-Fc fusions (and controls) as indicated by percentage proliferating cells (determined based on CFSE dilution). The data show that ICOS-targeted IL-15/Rα-Fc fusions are much more potent in inducing proliferation of CD4⁺CD45RA⁻ T cells and CD4⁺CD45RA⁺ T cells in comparison to untargeted IL-15/Rα-Fc fusion (as well as control RSV-targeted IL-15/Rα-Fc fusion). Experiment was performed using human PBMCs from donor 1.

[0084] FIGS. 34A-34B depict induction of A) CD4⁺CD45RA⁻ T cells and B) CD4⁺CD45RA⁺ T cells proliferation by ICOS-targeted IL-15/Rα-Fc fusions (and controls) as indicated by percentage proliferating cells (determined based on CFSE dilution). The data show that ICOS-targeted IL-15/Rα-Fc fusions are more potent in inducing proliferation of CD4⁺CD45RA⁻ T cells and CD4⁺CD45RA⁺ T cells in comparison to untargeted IL-15/Rα-Fc fusion (as well as control RSV-targeted IL-15/Rα-Fc fusion). Experiment was performed using human PBMCs from donor 2.

[0085] FIGS. 35A-35B depict induction of A) CD4⁺CD45RA⁻ T cells and B) CD4⁺CD45RA⁺ T cells proliferation by ICOS-targeted IL-15/Rα-Fc fusions (and controls) as indicated by cell counts. The data show that ICOS-targeted IL-15/Rα-Fc fusions are much more potent in inducing proliferation of CD4⁺CD45RA⁻ T cells and CD4⁺CD45RA⁺ T cells in comparison to untargeted IL-15/Rα-Fc fusion (as well as control RSV-targeted IL-15/Rα-Fc fusion). Experiment was performed using human PBMCs from donor 1.

[0086] FIGS. 36A-36B depict induction of A) CD4⁺CD45RA⁻ T cells and B) CD4⁺CD45RA⁺ T cells proliferation by ICOS-targeted IL-15/Rα-Fc fusions (and controls) as indicated by cell counts. The data show that ICOS-targeted IL-15/Rα-Fc fusions are much more potent in inducing proliferation of CD4⁺CD45RA⁻ T cells in comparison to untargeted IL-15/Rα-Fc fusion (as well as control RSV-targeted IL-15/Rα-Fc fusion). Experiment was performed using human PBMCs from donor 2.

[0087] FIGS. 37A-37B depict induction of NK cells proliferation by ICOS-targeted IL-15/Rα-Fc fusions (and controls) as indicated A) percentage proliferating cells (determined based on CFSE dilution) and B) by cell counts. The data show that ICOS-targeted IL-15/Rα-Fc fusions are much less potent in inducing proliferation of NK cells in comparison to untargeted IL-15/Rα-Fc fusion (as well as control RSV-targeted IL-15/Rα-Fc fusion). Experiment was performed using human PBMCs from donor 1.

[0088] FIGS. 38A-38B depicts induction of NK cells proliferation by ICOS-targeted IL-15/Rα-Fc fusions (and controls) as indicated A) percentage proliferating cells (determined based on CFSE dilution) and B) by cell counts. The data show that ICOS-targeted IL-15/Rα-Fc fusions are much less potent in inducing proliferation of NK cells in comparison to untargeted IL-15/Rα-Fc fusion (as well as control RSV-targeted IL-15/Rα-Fc fusion). Experiment was performed using human PBMCs from donor 2.

[0089] FIGS. 39A-39B depicts activation of A) CD8⁺CD45RA⁻ T cells and B) CD8⁺CD45RA⁺ T cells following incubation with ICOS-targeted IL-15/Rα-Fc fusions (and controls) as indicated by percentage cells expressing CD25. The data show that ICOS-targeted IL-15/Rα-Fc fusions appear to upregulate CD25 in both CD8⁺CD45RA⁻ T cells and CD8⁺CD45RA⁺ T cells more potently on CD4⁺CD45RA⁻ T cells in comparison to untargeted IL-15/Rα-Fc fusion (as well as control RSV-targeted IL-15/Rα-Fc fusion). Experiment was performed using human PBMCs from donor 1.

[0090] FIGS. 40A-40B depict activation of A) CD8⁺CD45RA⁻ T cells and B) CD8⁺CD45RA⁺ T cells following incubation with ICOS-targeted IL-15/Rα-Fc fusions (and controls) as indicated by percentage cells expressing CD25. The data show that ICOS-targeted IL-15/Rα-Fc fusions appear to upregulate CD25 in both CD8⁺CD45RA⁻ T cells and CD8⁺CD45RA⁺ T cells more potently in comparison to untargeted IL-15/Rα-Fc fusion (as well as control RSV-targeted IL-15/Rα-Fc fusion). Experiment was performed using human PBMCs from donor 2.

[0091] FIGS. 41A-41B depict activation of A) CD8⁺CD45RA⁻ T cells and B) CD8⁺CD45RA⁺ T cells following incubation with ICOS-targeted IL-15/Rα-Fc fusions (and controls) as indicated by CD25 MFI. Experiment was performed using human PBMCs from donor 1.

[0092] FIGS. 42A-42B depict activation of A) CD8⁺CD45RA⁻ T cells and B) CD8⁺CD45RA⁺ T cells following incubation with ICOS-targeted IL-15/Rα-Fc fusions (and controls) as indicated by CD25 MFI. Experiment was performed using human PBMCs from donor 2.

[0093] FIGS. 43A-43B depict activation of A) CD4⁺CD45RA⁻ T cells and B) CD4⁺CD45RA⁺ T cells following incubation with ICOS-targeted IL-15/Rα-Fc fusions (and controls) as indicated by percentage cells expressing CD25. The data show that ICOS-targeted IL-15/Rα-Fc fusions upregulate CD25 more potently on CD4⁺CD45RA⁻ T cells in comparison to untargeted IL-15/Rα-Fc fusion (as well as control RSV-targeted IL-15/Rα-Fc fusion). Experiment was performed using human PBMCs from donor 1.

[0094] FIGS. 44A-44B depict activation of A) CD4⁺CD45RA⁻ T cells and B) CD4⁺CD45RA⁺ T cells following incubation with ICOS-targeted IL-15/Rα-Fc fusions (and controls) as indicated by percentage cells expressing CD25. The data show that ICOS-targeted IL-15/Rα-Fc fusions upregulate CD25 more potently on CD4⁺CD45RA⁻ T cells and CD4⁺CD45RA⁺ T cells in comparison to untargeted IL-15/Rα-Fc fusion (as well as control RSV-targeted IL-15/Rα-Fc fusion). Experiment was performed using human PBMCs from donor 2.

[0095] FIGS. 45A-45B depicts activation of A) CD4⁺CD45RA⁻ T cells and B) CD4⁺CD45RA⁺ T cells following incubation with ICOS-targeted IL-15/Rα-Fc fusions (and controls) as indicated by CD25 MFI. Experiment was performed using human PBMCs from donor 1.

[0096] FIGS. 46A-46B depict activation of A) CD4⁺CD45RA⁻ T cells and B) CD4⁺CD45RA⁺ T cells following incubation with ICOS-targeted IL-15/Rα-Fc fusions (and controls) as indicated by CD25 MFI. The data show that ICOS-targeted IL-15/Rα-Fc fusions upregulate CD25 more potently on CD4⁺CD45RA⁻ T cells and CD4⁺CD45RA⁺ T cells in comparison to untargeted IL-15/Rα-Fc fusion (as well as control RSV-targeted IL-15/Rα-Fc fusion). Experiment was performed using human PBMCs from donor 2.

[0097] FIGS. 47A-47B depict activation of HLA-DR on A) CD8⁺CD45RA⁻ T cells and B) CD8⁺CD45RA⁺ T cells following incubation with ICOS-targeted IL-15/Rα-Fc fusions (and controls) as indicated by percentage cells expressing HLA-DR. Experiment was performed using human PBMCs from donor 1.

[0098] FIGS. 48A-48B depict activation of HLA-DR on A) CD8⁺CD45RA⁻ T cells and B) CD8⁺CD45RA⁺ T cells following incubation with ICOS-targeted IL-15/Rα-Fc fusions (and controls) as indicated by percentage cells expressing HLA-DR. Experiment was performed using human PBMCs from donor 2.

[0099] FIGS. 49A-49B depict activation of A) CD8⁺CD45RA⁻ T cells and B) CD8⁺CD45RA⁺ T cells following incubation with ICOS-targeted IL-15/Rα-Fc fusions (and controls) as indicated by HLA-DR MFI. Experiment was performed using human PBMCs from donor 1.

[0100] FIGS. 50A-50B depict activation of A) CD8⁺CD45RA⁻ T cells and B) CD8⁺CD45RA⁺ T cells following incubation with ICOS-targeted IL-15/Rα-Fc fusions (and controls) as indicated by HLA-DR MFI. Experiment was performed using human PBMCs from donor 2.

[0101] FIGS. 51A-51B depict activation of A) CD4⁺CD45RA⁻ T cells and B) CD4⁺CD45RA⁺ T cells following incubation with ICOS-targeted IL-15/Rα-Fc fusions (and controls) as indicated by percentage cells expressing HLA-DR. Experiment was performed using human PBMCs from donor 1.

[0102] FIGS. 52A-52B depict activation of A) CD4⁺CD45RA⁻ T cells and B) CD4⁺CD45RA⁺ T cells following incubation with ICOS-targeted IL-15/Rα-Fc fusions (and controls) as indicated by percentage cells expressing HLA-DR. Experiment was performed using human PBMCs from donor 2.

[0103] FIGS. 53A-53B depict activation of A) CD4⁺CD45RA⁻ T cells and B) CD4⁺CD45RA⁺ T cells following incubation with ICOS-targeted IL-15/Rα-Fc fusions (and controls) as indicated by HLA-DR MFI. Experiment was performed using human PBMCs from donor 1.

[0104] FIGS. 54A-54B depict activation of A) CD4⁺CD45RA⁻ T cells and B) CD4⁺CD45RA⁺ T cells following incubation with ICOS-targeted IL-15/Rα-Fc fusions (and controls) as indicated by HLA-DR MFI. Experiment was performed using human PBMCs from donor 2.

[0105] FIG. 55 depicts the sequences of XENP22853, an IL-15/Rα-heteroFc fusion comprising a wild-type IL-15 and Xtend Fc (M428L/N434S) variant. IL-15 and IL-15Rα(sushi) are underlined, linkers are double underlined (although as will be appreciated by those in the art, the linkers can be replaced by other linkers, some of which are depicted in the Figures, and slashes (/) indicate the border(s) between IL-15, IL-15Rα, linkers, and constant/Fc regions.

[0106] FIG. 56 depicts the sequences of XENP4113, an IL-15/Rα-heteroFc fusion comprising a IL-15(N4D/N65D) variant and Xtend Fc (M428L/N434S) variant. IL-15 and IL-15Rα(sushi) are underlined, linkers are double underlined (although as will be appreciated by those in the art, the linkers can be replaced by other linkers, some of which are depicted in the Figures, and slashes (/) indicate the border(s) between IL-15, IL-15Rα, linkers, and constant/Fc regions.

[0107] FIG. 57 depicts the sequences of XENP24294, an scIL-15/Rα-Fc fusion comprising a IL-15(N4D/N65D) variant and Xtend Fc (M428L/N434S) substitution. IL-15 and IL-15Rα(sushi) are underlined, linkers are double underlined (although as will be appreciated by those in the art, the linkers can be replaced by other linkers, some of which are depicted in the Figures, and slashes (/) indicate the border(s) between IL-15, IL-15Rα, linkers, and constant/Fc regions.

[0108] FIG. 58 depicts the sequences of XENP24306, an IL-15/Rα-heteroFc fusion comprising a IL-15(D30N/E64Q/N65D) variant and Xtend Fc (M428L/N434S) substitution. IL-15 and IL-15Rα(sushi) are underlined, linkers are double underlined (although as will be appreciated by those in the art, the linkers can be replaced by other linkers, some of which are depicted in the Figures, and slashes (/) indicate the border(s) between IL-15, IL-15Rα, linkers, and constant/Fc regions.

[0109] FIG. 59 depicts the serum concentration of the indicated test articles over time in cynomolgus monkeys following a first dose at the indicated relative concentrations.

[0110] FIGS. 60A-60B depict the variable heavy and variable light chains for additional illustrative ICOS ABDs. The variable heavy chains, variable lights, and six CDRs of such ICOS ABDs find use in the fusion proteins and antibodies described herein. The CDRs are underlined. As noted herein and is true for every sequence herein containing CDRs, the exact identification of the CDR locations may be slightly different depending on the numbering used as is shown in Table 1, and thus included herein are not only the CDRs that are underlined but also CDRs included within the V_{H} and V_{L} domains using other numbering systems.

[0111] FIGS. 61A-61P depict sequences of additional illustrative ICOS-targeted IL-15/Rα-Fc fusion proteins of the “scIL-15/Rα x Fab” format. The CDRs are underlined. As noted herein and is true for every sequence herein containing CDRs, the exact identification of the CDR locations may be slightly different depending on the numbering used as is shown in Table 1, and thus included herein are not only the CDRs that are underlined but also CDRs included within the VH and VL domains using other numbering systems. IL-15 and IL-15Rα(sushi) are underlined, linkers are double underlined (although as will be appreciated by those in the art, the linkers can be replaced by other linkers, some of which are depicted in FIGS. 9 and 10), and slashes (/) indicate the border(s) between IL-15, IL-15Rα, linkers, variable regions, and constant/Fc regions. As will be clear to those skilled in the art, each of the ICOS-targeted IL-15/Rα-Fc fusion proteins described can also include Xtend Fc (M428L/N434S).

[0112] FIGS. 62A-62G depict anti-ICOS antibodies. The variable heavy chains, variable light chains, and 6 CDRs of such antibodies find use in the fusion proteins and antibodies provided herein. The CDRs are underlined. As noted herein and is true for every sequence herein containing CDRs, the exact identification of the CDR locations may be slightly different depending on the numbering used as is shown in Table 1, and thus included herein are not only the CDRs that are underlined but also CDRs included within the VH and VL domains using other numbering systems.

[0113] FIGS. 63A-63G depict anti-ICOS antibodies. The variable heavy, variable light chains, and 6 CDRs of such antibodies find use in the fusion proteins and antibodies provided herein. The CDRs are underlined. As noted herein and is true for every sequence herein containing CDRs, the exact identification of the CDR locations may be slightly different depending on the numbering used as is shown in Table 1, and thus included herein are not only the CDRs that are underlined but also CDRs included within the VH and VL domains using other numbering systems.

[0114] FIGS. 64A-64M depict ICOS antigen binding domains (ABDs). The variable heavy, variable light chains, and 6 CDRs of such ICOS binding domains find use in the fusion proteins and antibodies provided herein. The CDRs are underlined. As noted herein and is true for every sequence herein containing CDRs, the exact identification of the CDR locations may be slightly different depending on the numbering used as is shown in Table 1, and thus included herein are not only the CDRs that are underlined but also CDRs included within the VH and VL domains using other numbering systems.

### DETAILED DESCRIPTION

### I. Definitions

[0115] In order that the application may be more completely understood, several definitions are set forth below. Such definitions are meant to encompass grammatical equivalents.

[0116] By “ablation” herein is meant a decrease or removal of activity. Thus for example, “ablating FcγR binding” means the Fc region amino acid variant has less than 50% starting binding as compared to an Fc region not containing the specific variant, with less than 70-80-90-95-98% loss of activity being preferred, and in general, with the activity being below the level of detectable binding in a Biacore assay. Of particular use in the ablation of FcγR binding are those shown in FIG. 6. However, unless otherwise noted, the Fc monomers of the invention retain binding to the FcRn receptor.

[0117] By “ADCC” or “antibody dependent cell-mediated cytotoxicity” as used herein is meant the cell-mediated reaction wherein nonspecific cytotoxic cells that express FcγRs recognize bound antibody on a target cell and subsequently cause lysis of the target cell. ADCC is correlated with binding to FcγRIIIa; increased binding to FcγRIIIa leads to an increase in ADCC activity. As is discussed herein, many embodiments of the invention ablate ADCC activity entirely.

[0118] By “ADCP” or antibody dependent cell-mediated phagocytosis as used herein is meant the cell-mediated reaction wherein nonspecific cytotoxic cells that express FcγRs recognize bound antibody on a target cell and subsequently cause phagocytosis of the target cell.

[0119] By “antigen binding domain” or “ABD” herein is meant a set of six Complementary Determining Regions (CDRs) that, when present as part of a polypeptide sequence, specifically binds a target antigen as discussed herein. Thus, a “ICOS antigen binding domain” binds a human ICOS antigen as outlined herein. As is known in the art, these CDRs are generally present as a first set of variable heavy CDRs (vhCDRs or VHCDRs) and a second set of variable light CDRs (vlCDRs or VLCDRs), each comprising three CDRs: vhCDR1, vhCDR2, vhCDR3 for the heavy chain and vlCDR1, vlCDR2 and vlCDR3 for the light. The CDRs are present in the variable heavy and variable light domains, respectively, and together form an Fv region. Thus, in some cases, the six CDRs of the antigen binding domain are contributed by a variable heavy and variable light chain. In a “Fab” format, the set of 6 CDRs are contributed by two different polypeptide sequences, the variable heavy domain (vh or VH; containing the vhCDR1, vhCDR2 and vhCDR3) and the variable light domain (vl or VL; containing the vlCDR1, vlCDR2 and vlCDR3), with the C-terminus of the vh domain being attached to the N-terminus of the CH1 domain of the heavy chain and the C-terminus of the vl domain being attached to the N-terminus of the constant light domain (and thus forming the light chain). In a scFv format, the vh and vl domains are covalently attached, generally through the use of a linker as outlined herein, into a single polypeptide sequence, which can be either (starting from the N-terminus) vh-linker-vl or vl-linker-vh, with the former being generally preferred (including optional domain linkers on each side, depending on the format used (e.g., from FIG. 1 of U.S. 62/353,511).

[0120] By “modification” herein is meant an amino acid substitution, insertion, and/or deletion in a polypeptide sequence or an alteration to a moiety chemically linked to a protein. For example, a modification may be an altered carbohydrate or PEG structure attached to a protein. By “amino acid modification” herein is meant an amino acid substitution, insertion, and/or deletion in a polypeptide sequence. For clarity, unless otherwise noted, the amino acid modification is always to an amino acid coded for by DNA, e.g., the 20 amino acids that have codons in DNA and RNA.

[0121] By “amino acid substitution” or “substitution” herein is meant the replacement of an amino acid at a particular position in a parent polypeptide sequence with a different amino acid. In particular, in some embodiments, the substitution is to an amino acid that is not naturally occurring at the particular position, either not naturally occurring within the organism or in any organism. For example, the substitution E272Y refers to a variant polypeptide, in this case an Fc variant, in which the glutamic acid at position 272 is replaced with tyrosine. For clarity, a protein which has been engineered to change the nucleic acid coding sequence but not change the starting amino acid (for example exchanging CGG (encoding arginine) to CGA (still encoding arginine) to increase host organism expression levels) is not an “amino acid substitution”; that is, despite the creation of a new gene encoding the same protein, if the protein has the same amino acid at the particular position that it started with, it is not an amino acid substitution.

[0122] By “amino acid insertion” or “insertion” as used herein is meant the addition of an amino acid sequence at a particular position in a parent polypeptide sequence. For example, −233E or 233E designates an insertion of glutamic acid after position 233 and before position 234. Additionally, −233ADE or A233ADE designates an insertion of AlaAspGlu after position 233 and before position 234.

[0123] By “amino acid deletion” or “deletion” as used herein is meant the removal of an amino acid sequence at a particular position in a parent polypeptide sequence. For example, E233− or E233#, E233( ) or E233del designates a deletion of glutamic acid at position 233. Additionally, EDA233− or EDA233# designates a deletion of the sequence GluAspAla that begins at position 233.

[0124] By “variant protein” or “protein variant”, or “variant” as used herein is meant a protein that differs from that of a parent protein by virtue of at least one amino acid modification. Protein variant may refer to the protein itself, a composition comprising the protein, or the amino sequence that encodes it. Preferably, the protein variant has at least one amino acid modification compared to the parent protein, e.g. from about one to about seventy amino acid modifications, and preferably from about one to about five amino acid modifications compared to the parent. As described below, in some embodiments the parent polypeptide, for example an Fc parent polypeptide, is a human wild type sequence, such as the Fc region from IgG1, IgG2, IgG3 or IgG4. The protein variant sequence herein will preferably possess at least about 80% identity with a parent protein sequence, and most preferably at least about 90% identity, more preferably at least about 95-98-99% identity. Variant protein can refer to the variant protein itself, compositions comprising the protein variant, or the DNA sequence that encodes it.

[0125] Accordingly, by “Fc variant” or “variant Fc” as used herein is meant a protein comprising an amino acid modification in an Fc domain. The Fc variants of the present invention are defined according to the amino acid modifications that compose them. Thus, for example, N434S or 434S is an Fc variant with the substitution serine at position 434 relative to the parent Fc polypeptide, wherein the numbering is according to the EU index. Likewise, M428L/N434S defines an Fc variant with the substitutions M428L and N434S relative to the parent Fc polypeptide. The identity of the WT amino acid may be unspecified, in which case the aforementioned variant is referred to as 428L/434S. It is noted that the order in which substitutions are provided is arbitrary, that is to say that, for example, 428L/434S is the same Fc variant as M428L/N434S, and so on. For all positions discussed in the present invention that relate to antibodies, unless otherwise noted, amino acid position numbering is according to the EU index. The EU index or EU index as in Kabat or EU numbering scheme refers to the numbering of the EU antibody (Edelman et al., 1969, Proc Natl Acad Sci USA 63:78-85, hereby entirely incorporated by reference). The modification can be an addition, deletion, or substitution. Substitutions can include naturally occurring amino acids and, in some cases, synthetic amino acids. Examples include U.S. Pat. No. 6,586,207; WO 98/48032; WO 03/073238; U52004-0214988A1; WO 05/35727A2; WO 05/74524A2; J. W. Chin et al., (2002), Journal of the American Chemical Society 124:9026-9027; J. W. Chin, & P. G. Schultz, (2002), ChemBioChem 11:1135-1137; J. W. Chin, et al., (2002), PICAS United States of America 99:11020-11024; and, L. Wang, & P. G. Schultz, (2002), Chem. 1-10, all entirely incorporated by reference.

[0126] As used herein, “protein” herein is meant at least two covalently attached amino acids, which includes proteins, polypeptides, oligopeptides and peptides.

[0127] By “residue” as used herein is meant a position in a protein and its associated amino acid identity. For example, Asparagine 297 (also referred to as Asn297 or N297) is a residue at position 297 in the human antibody IgG1.

[0128] By “Fab” or “Fab region” as used herein is meant the polypeptide that comprises the VH, CH1, VL, and CL immunoglobulin domains. Fab may refer to this region in isolation, or this region in the context of a full length antibody, antibody fragment or Fab fusion protein.

[0129] By “Fv” or “Fv fragment” or “Fv region” as used herein is meant a polypeptide that comprises the VL and VH domains of a single antibody. As will be appreciated by those in the art, these generally are made up of two chains, or can be combined (generally with a linker as discussed herein) to form an scFv.

[0130] By “single chain Fv” or “scFv” herein is meant a variable heavy domain covalently attached to a variable light domain, generally using a scFv linker as discussed herein, to form a scFv or scFv domain. A scFv domain can be in either orientation from N- to C-terminus (vh-linker-vl or vl-linker-vh).

[0131] By “IgG subclass modification” or “isotype modification” as used herein is meant an amino acid modification that converts one amino acid of one IgG isotype to the corresponding amino acid in a different, aligned IgG isotype. For example, because IgG1 comprises a tyrosine and IgG2 a phenylalanine at EU position 296, a F296Y substitution in IgG2 is considered an IgG subclass modification.

[0132] By “non-naturally occurring modification” as used herein is meant an amino acid modification that is not isotypic. For example, because none of the IgGs comprise a serine at position 434, the substitution 434S in IgG1, IgG2, IgG3, or IgG4 (or hybrids thereof) is considered a non-naturally occurring modification.

[0133] By “amino acid” and “amino acid identity” as used herein is meant one of the 20 naturally occurring amino acids that are coded for by DNA and RNA.

[0134] By “effector function” as used herein is meant a biochemical event that results from the interaction of an antibody Fc region with an Fc receptor or ligand. Effector functions include but are not limited to ADCC, ADCP, and CDC.

[0135] By “Fc gamma receptor”, “FcγR” or “FcgammaR” as used herein is meant any member of the family of proteins that bind the IgG antibody Fc region and is encoded by an FcγR gene. In humans this family includes but is not limited to FcγRI (CD64), including isoforms FcγRIa, FcγRIb, and FcγRIc; FcγRII (CD32), including isoforms FcγRIIa (including allotypes H131 and R131), FcγRIIb (including FcγRIIb-1 and FcγRIIb-2), and FcγRIIc; and FcγRIII (CD16), including isoforms FcγRIIIa (including allotypes V158 and F158) and FcγRIIIb (including allotypes FcγRIIb-NA1 and FcγRIIb-NA2) (Jefferis et al., 2002, Immunol Lett 82:57-65, entirely incorporated by reference), as well as any undiscovered human FcγRs or FcγR isoforms or allotypes.

[0136] By “FcRn” or “neonatal Fc Receptor” as used herein is meant a protein that binds the IgG antibody Fc region and is encoded at least in part by an FcRn gene. As is known in the art, the functional FcRn protein comprises two polypeptides, often referred to as the heavy chain and light chain. The light chain is beta-2-microglobulin and the heavy chain is encoded by the FcRn gene. Unless otherwise noted herein, FcRn or an FcRn protein refers to the complex of FcRn heavy chain with beta-2-microglobulin. A variety of FcRn variants can be used to increase binding to the FcRn receptor, and in some cases, to increase serum half-life. In general, unless otherwise noted, the Fc monomers of the invention retain binding to the FcRn receptor (and, as noted below, can include amino acid variants to increase binding to the FcRn receptor).

[0137] By “parent polypeptide” as used herein is meant a starting polypeptide that is subsequently modified to generate a variant. The parent polypeptide may be a naturally occurring polypeptide, or a variant or engineered version of a naturally occurring polypeptide. Parent polypeptide may refer to the polypeptide itself, compositions that comprise the parent polypeptide, or the amino acid sequence that encodes it.

[0138] By “Fc” or “Fc region” or “Fc domain” as used herein is meant the polypeptide comprising the constant region of an antibody excluding the first constant region immunoglobulin domain (e.g., CH1) and in some cases, part of the hinge. For IgG, the Fc domain comprises immunoglobulin domains CH2 and CH3 (Cγ2 and Cγ3) and the lower hinge region between CH1 (Cγ1) and CH2 (Cγ2). Although the boundaries of the Fc region may vary, the human IgG heavy chain Fc region is usually defined to include residues C226 or P230 to its carboxyl-terminus, wherein the numbering is according to the EU index as in Kabat. Accordingly, “CH” domains in the context of IgG are as follows: “CH1” refers to positions 118-215 according to the EU index as in Kabat. “Hinge” refers to positions 216-230 according to the EU index as in Kabat. “CH2” refers to positions 231-340 according to the EU index as in Kabat, and “CH3” refers to positions 341-447 according to the EU index as in Kabat. Thus, the “Fc domain” includes the —CH2-CH3 domain, and optionally a hinge domain (hinge-CH2-CH3). In the embodiments herein, when a scFv or IL-15 complex is attached to an Fc domain, it is the C-terminus of the scFv construct that is attached to all or part of the hinge of the Fc domain; for example, it is generally attached to the sequence EPKS which is the beginning of the hinge. In some embodiments, as is more fully described below, amino acid modifications are made to the Fc region, for example to alter binding to one or more FcγR receptors or to the FcRn receptor, and to enable heterodimer formation and purification, as outlined herein.

[0139] By “heavy constant region” herein is meant the CH1-hinge-CH2-CH3 portion of an antibody.

[0140] By “Fc fusion protein” or “immunoadhesin” herein is meant a protein comprising an Fc region, generally linked (optionally through a linker moiety, as described herein) to a different protein, such as to IL-15 and/or IL-15Rα(sushi), as described herein. In some instances, two Fc fusion proteins can form a homodimeric Fc fusion protein or a heterodimeric Fc fusion protein with the latter being preferred. In some cases, one monomer of the heterodimeric Fc fusion protein comprises an Fc domain alone (e.g., an empty Fc domain) and the other monomer is a Fc fusion, comprising a variant Fc domain and a protein domain, such as a receptor, ligand or other binding partner.

[0141] By “position” as used herein is meant a location in the sequence of a protein. Positions may be numbered sequentially, or according to an established format, for example the EU index for antibody numbering.

[0142] By “strandedness” in the context of the monomers of the heterodimeric antibodies of the invention herein is meant that, similar to the two strands of DNA that “match”, heterodimerization variants are incorporated into each monomer so as to preserve the ability to “match” to form heterodimers. For example, if some pI variants are engineered into monomer A (e.g., making the pI higher) then steric variants that are “charge pairs” that can be utilized as well do not interfere with the pI variants, e.g., the charge variants that make a pI higher are put on the same “strand” or “monomer” to preserve both functionalities. Similarly, for “skew” variants that come in pairs of a set as more fully outlined below, the skilled artisan will consider pI in deciding into which strand or monomer that incorporates one set of the pair will go, such that pI separation is maximized using the pI of the skews as well.

[0143] By “target cell” as used herein is meant a cell that expresses the target antigen, in this case, ICOS.

[0144] By “variable region” as used herein is meant the region of an immunoglobulin that comprises one or more Ig domains substantially encoded by any of the Vκ, Vλ, and/or VH genes that make up the kappa, lambda, and heavy chain immunoglobulin genetic loci respectively.

[0145] By “wild type or WT” herein is meant an amino acid sequence or a nucleotide sequence that is found in nature, including allelic variations. A WT protein has an amino acid sequence or a nucleotide sequence that has not been intentionally modified.

[0146] The ICOS targeted heterodimeric fusion proteins of the present invention are generally isolated or recombinant. “Isolated,” when used to describe the various polypeptides disclosed herein, means a polypeptide that has been identified and separated and/or recovered from a cell or cell culture from which it was expressed. Ordinarily, an isolated polypeptide will be prepared by at least one purification step. An “isolated protein,” refers to a protein which is substantially free of other proteins having different binding specificities. “Recombinant” means the proteins are generated using recombinant nucleic acid techniques in exogeneous host cells.

[0147] “Percent (%) amino acid sequence identity” with respect to a protein sequence is defined as the percentage of amino acid residues in a candidate sequence that are identical with the amino acid residues in the specific (parental) sequence, after aligning the sequences and introducing gaps, if necessary, to achieve the maximum percent sequence identity, and not considering any conservative substitutions as part of the sequence identity. Alignment for purposes of determining percent amino acid sequence identity can be achieved in various ways that are within the skill in the art, for instance, using publicly available computer software such as BLAST, BLAST-2, ALIGN or Megalign (DNASTAR) software. Those skilled in the art can determine appropriate parameters for measuring alignment, including any algorithms needed to achieve maximal alignment over the full length of the sequences being compared. One particular program is the ALIGN-2 program outlined at paragraphs [0279] to [0280] of US Pub. No. 20160244525, hereby incorporated by reference.

[0148] The degree of identity between an amino acid sequence of the present invention (“invention sequence”) and the parental amino acid sequence is calculated as the number of exact matches in an alignment of the two sequences, divided by the length of the “invention sequence,” or the length of the parental sequence, whichever is the shortest. The result is expressed in percent identity.

[0149] In some embodiments, two or more amino acid sequences are at least 50%, 60%, 70%, 80%, or 90% identical. In some embodiments, two or more amino acid sequences are at least 95%, 97%, 98%, 99%, or even 100% identical.

[0150] “Specific binding” or “specifically binds to” or is “specific for” a particular antigen or an epitope (in this case, human ICOS) means binding that is measurably different from a non-specific interaction. Specific binding can be measured, for example, by determining binding of a molecule compared to binding of a control molecule, which generally is a molecule of similar structure that does not have binding activity. For example, specific binding can be determined by competition with a control molecule that is similar to the target.

[0151] Specific binding for a particular antigen or an epitope can be exhibited, for example, by an antibody having a KD for an antigen or epitope of at least about 10⁻⁴ M, at least about 10⁻⁵ M, at least about 10⁻⁶ M, at least about 10⁻⁷ M, at least about 10⁻⁸M, at least about 10⁻⁹M, alternatively at least about 10⁻¹⁰ M, at least about 10⁻¹¹M, at least about 10⁻¹² M, or greater, where KD refers to a dissociation rate of a particular antibody-antigen interaction. Typically, an antibody that specifically binds an antigen will have a KD that is 20-, 50-, 100-, 500-, 1000-, 5,000-, 10,000- or more times greater for a control molecule relative to the antigen or epitope.

[0152] Also, specific binding for a particular antigen or an epitope can be exhibited, for example, by an antibody having a KA or Ka for an antigen or epitope of at least 20-, 50-, 100-, 500-, 1000-, 5,000-, 10,000- or more times greater for the epitope relative to a control, where KA or Ka refers to an association rate of a particular antibody-antigen interaction. Binding affinity is generally measured using a Biacore assay.

### II. Introduction

[0153] The invention provides heterodimeric fusion proteins that contain two functionalities, an IL-15 function and an ICOS antigen binding domain. As shown in FIG. 25, these fusion proteins can take on a number of different formats. In general, the proteins of the invention are multimeric, in that they contain two or more separate polypeptide chains that self-associate to form multimeric (including heterodimeric) protein complexes.

[0154] In some aspects, the heterodimeric fusion proteins contain an IL-15/IL-15Rα complex on one side and an anti-human ICOS antigen binding domain on the other. Thus, the heterodimeric fusion proteins of the invention can bind to the checkpoint ICOS antigen and can complex with the common gamma chain (yc; CD132) and/or the IL-2 receptor β-chain (IL-2Rβ; CD122). In general, the heterodimeric fusion proteins of the invention have three functional components: an IL-15/IL-15Rα(sushi) component, generally referred to herein as an “IL-15 complex”, an ICOS ABD (referred to as “ICOS ABD” interchangeably) component (which serves as a “targeting” moiety by bringing the fusion protein to a cell expressing ICOS), and an Fc component, each of which can take different forms and each of which can be combined with the other components in any configuration.

[0155] In some cases, as is more fully discussed below, the fusion proteins of the invention do not include a sushi domain; rather, the IL-15 variant has been engineered to reduce or ablate the ability of IL-15 to bind to the IL-15 receptor and in particular the sushi domain.

[0156] Additionally, in some cases, the IL-15 component is wild-type human IL-15.

[0157] In general, as is more fully described herein, the fusion proteins of the invention are heterodimeric fusion proteins that are based on the association of antibody Fc domains. That is, by using two different variant Fc domains that have been engineered to favor the formation of heterodimers over homodimers, the heterodimeric fusion proteins are formed. In this case, one of the variant Fc domains is fused to an IL-15/Rα complex (or an IL-15 variant that does not associate with the sushi domain) and the other has an ICOS ABD as more fully outlined herein. By including optional pI variants, the heterodimers can be more easily purified away from the homodimers. Additionally, the inclusion of ablation variants eliminates the effector functions of the Fc domains.

[0158] A. IL-15/IL-15Rα(Sushi) Domains

[0159] As shown in the figures, the IL-15/Rα complex can take several forms. As stated above, the IL-15 protein on its own is less stable than when complexed with the IL-15Rα protein. As is known in the art, the IL-15Rα protein contains a “sushi domain”, which is the shortest region of the receptor that retains IL-15 binding activity. Thus, while heterodimeric fusion proteins comprising the entire IL-15Rα protein can be made, preferred embodiments herein include complexes that just use the sushi domain, the sequence of which is shown in the figures.

[0160] Accordingly, the IL-15/Rα complex generally comprises the IL-15 protein and the sushi domain of IL-15Rα (unless otherwise noted that the full length sequence is used, “IL-15Rα”, “IL-15Rα(sushi)”, “IL-15RA” and “sushi” are used interchangeably throughout). When complexed together, the nomenclature is depicted with a “slash”, “/”, as “IL-15/Rα”, meaning that there is an IL-15 domain and an IL-15Rα domain present.

[0161] Importantly, the IL-15 component is generally engineered to reduce its potency. In many embodiments, the wild-type IL-15 is too potent and can cause undesirable toxicity. Accordingly, the IL-15 component of the IL-15/Rα complex can have one or more amino acid substitutions that result in decreased activity. Various amino acid substitutions were made (see FIG. 19) and tested (see FIG. 20A-FIG. 20C). Of particular interest in some embodiments are a double variant IL-15, N4D/N65D or D30N/N65D, or a triple variant IL-15, D30N/E64Q/N65D. Additional IL-15 variants are discussed below.

[0162] The targeted IL-15/IL-15Rα heterodimeric fusion proteins of the present invention include an IL-15/IL-15 receptor alpha (IL-15Rα)-Fc fusion monomer; reference is made to US2018/0118828, filed 16, October 2017, U.S. Ser. No. 62/408,655, filed on Oct. 14, 2016, U.S. Ser. No. 62/416,087, filed on October Nov. 1, 2016, U.S. Ser. No. 62/443,465, filed on Jan. 6, 2017, U.S. Ser. No. 62/477,926, filed on Mar. 28, 2017, and U.S. Ser. No. 62/659,571, filed on Apr. 18, 2018, hereby incorporated by reference in their entirety and in particular for the sequences outlined therein. In some cases, the IL-15 and IL-15 receptor alpha (IL-15Rα) protein domains are in different orientations. Exemplary embodiments of IL-15/IL-15Rα-Fc fusion monomers are provided in XENP21480 (chain 1; FIG. 64A), XENP22022 (chain 1, FIG. 64D), XENP22112, (chains 1 and 3; FIG. 64E), XENP22641 (chains 2 and 4; FIG. 64F), XENP22642, (chains 1 and 4; FIG. 64H) and XENP22644 (chains 1 and 4; FIG. 64I) as described, for example, in US 2018/0118828.

[0163] 1. IL-15 Variants that Associate with IL-15(Sushi)

[0164] Of particular use in many embodiments are IL-15 variants that retain the ability to bind or associate with the IL-15 receptor alpha (e.g. the sushi domain) but have reduced potency as outlined below. While in some cases the human wild-type IL-15 protein can be used (e.g. the amino acid sequence set forth in NCBI Ref. Seq. No. NP 000576.1 as shown in FIG. 2, with the original coding sequence of human IL-15 is set forth in NCBI Ref. Seq. No. NM_000585), in many cases, amino acid modifications are preferred as outlined herein. An exemplary IL-15 protein of the Fc fusion heterodimeric fusion protein outlined herein can have the amino acid sequence of SEQ ID NO:2 or amino acids 49-162 of SEQ ID NO:1. In some embodiments, the IL-15 protein has at least 90%, e.g., 90%, 91%, 92%, 93%, 94%, 95%, 96%, 97%, 98%, 99%, or more sequence identity to SEQ ID NO:2.

[0165] Furthermore, in some embodiments, the IL-15 human protein is engineered to confer decreased potency as is generally described in PCT/US2019/028107, hereby incorporated by reference in its entirety. That is, as described therein, reduction in potency of IL-15 in the heterodimeric fusion proteins of the invention (optionally with and without Xtend-Fc substitutions described herein such as M428L/N434S or M428L/N434A or others described below) can enhance both pharmacodynamics and pharmacokinetics in subjects that are administered such proteins. Similarly, as shown in Example 7 of PCT/US2019/028107, that reduced potency IL-15/Rα-Fc variants such as XENP22821 can expand lymphocyte counts for a greater duration than wild-type IL-15/Rα-Fc fusion proteins described therein such as XENP20818. Notably, XENP23343, the Xtend-analog of XENP22821, further enhanced the duration of lymphocyte expansion beyond XENP22821. In addition, the reduction in potency of IL-15 can improve therapeutic index (i.e. enable higher dosing with less toxicity). As illustrated in the Example 8 of PCT/US2019/028107 for an “untargeted molecule” such as XmAb24306, IL-15/Rα-Fc fusion proteins such as those incorporated herein can overcome Treg suppression induced effector T cell proliferation.

[0166] Accordingly, the present invention provides a number of suitable IL-15 amino acid variants that confer reduced potency and increased pharmokinetics, including, but not limited to, variant IL-15 proteins comprising amino acid substitution(s) selected from the group of N1D; N4D; D8N; D30N; D61N; E64Q; N65D; Q108E; N1D/N4D/D8N; N1D/N4D/N65D; N1D/D30N; N1D/D61N; N1D/D61N/E64Q/Q108E; N1D/E64Q; N1D/N65D; N1D/Q108E; N4D; N4D/D30N; N4D/D61N; N4D/D61N/N65D; N4D/D61N/E64Q/Q108E; N4D/E64Q; N4D/N65D; D8N/D61N; D8N/E64Q; D30N/E64Q; D30N/N65D; D30N/E64Q/N65D; D30N/Q180E; D61N/E64Q/N65D; E64Q; E64Q/N65D; E64Q/Q108E; and N65D/Q108E.

[0167] In some embodiments, the IL-15 protein has the amino acid sequence set forth in SEQ ID NO:2 except with the amino acid substitution N72D. In other embodiments, the IL-15 protein has the amino acid sequence of SEQ ID NO:2 except with one or more amino acid substitutions selected from the group consisting of C42S, L45C, Q48C, V49C, L52C, E53C, E87C, and E89C. In some aspects, the IL-15 protein has one or more amino acid substitutions selected from the group consisting of N1D, N4D, D8N, D30N, D61N, E64Q, N65D, and Q108E. In other embodiments, the amino acid substitutions are N4D/N65D. In certain embodiments, the amino acid substitutions are D30N/N65D. In some embodiments, the amino acid substitution is Q108E. In certain embodiments, the amino acid substitution is N65D. In other embodiments, the amino acid substitutions are D30N/E64Q/N65D. In certain embodiments, the amino acid substitution is N65D. In some instances, the amino acid substitutions are N1D/N65D. In some instances, the amino acid substitutions are D30N/N65D. Optionally, the IL-15 protein also has an N72D substitution. The IL-15 protein of the Fc fusion protein can have 1, 2, 3, 4, 5, 6, 7, 8 or 9 amino acid substitutions. In some embodiments, the IL-15 protein of the Fc fusion protein comprises a D30N substitution. In some embodiments, the IL-15 protein of the Fc fusion protein comprises a N65D substitution. In some embodiments, the IL-15 protein of the Fc fusion contains one or more amino acid substitutions at the IL-15:CD132 interface. In certain embodiments, the Fc fusion protein described herein induces proliferation of NK cells and CD8+ T cells.

[0168] 2. IL-15 Variants that do not Associate with IL-15Rα

[0169] In some cases, variant human IL-15 proteins are used that do not self-associate with the IL-15 receptor and in particular the sushi domain. As generally described in U.S. Pat. No. 11,059,876 (hereby expressly incorporated by reference and specifically for the variants and sequences outlined in Tables 3, 4 and 6), IL-15 variants can be made that have decreased or no binding to the IL-15Rα (also referred to as CD215) and optionally reduced binding (as compared to wild type) to its signaling receptor (comprised of the IL-2 receptor beta (CD122) and the common gamma chain (CD132)). Accordingly, specific variants of human IL-15 that do not associate with the IL-15Rα component, include, but are not limited to, N1G/D30N/E46G/V49R/E64Q (referred to in U.S. Pat. No. 11,059,876 as the “M2” construct), D22N/Y26F/E46Q/E53Q/E89Q/E93Q (referred to in U.S. Pat. No. 11,059,876 as “NQ”) and V49R/E46G/N1A/D30N, referred to in U.S. Pat. No. 11,059,876 as “M1”).

[0170] 3. IL-15RA Components

[0171] As will be appreciated by those in the art, both wild-type human IL-15Rα or variants thereof can be used in the present invention. With the exception of the use of IL-15 variants that ablate binding to the sushi domain, as outlined above, when IL-15 variants are used, they retain the ability to bind to the sushi domain, including the wild type sushi domain. In some embodiments, the human IL-15 receptor alpha (IL-15Rα) protein has the amino acid sequence set forth in NCBI Ref. Seq. No. NP 002180.1 or SEQ ID NO:3. In some cases, the coding sequence of human IL-15Rα is set forth in NCBI Ref. Seq. No. NM_002189.3. An exemplary the IL-15Rα protein of the Fc fusion heterodimeric fusion protein outlined herein can comprise or consist of the sushi domain of SEQ ID NO:3 (e.g., amino acids 31-95 of SEQ ID NO:3), or in other words, the amino acid sequence of SEQ ID NO:4. In some embodiments, the IL-15Rα protein has the amino acid sequence of SEQ ID NO:4 and an amino acid insertion selected from the group consisting of D96, P97, A98, D96/P97, D96/C97, D96/P97/A98, D96/P97/C98, and D96/C97/A98, wherein the amino acid position is relative to full-length human IL-15Rα protein or SEQ ID NO:3. For instance, amino acid(s) such as D (e.g., Asp), P (e.g., Pro), A (e.g., Ala), DP (e.g., Asp-Pro), DC (e.g., Asp-Cys), DPA (e.g., Asp-Pro-Ala), DPC (e.g., Asp-Pro-Cys), or DCA (e.g., Asp-Cys-Ala) can be added to the C-terminus of the IL-15Rα protein of SEQ ID NO:4. In some embodiments, the IL-15Rα protein has the amino acid sequence of SEQ ID NO:4 and one or more amino acid substitutions selected from the group consisting of K34C, A37C, G38C, 540C, and L42C, wherein the amino acid position is relative to SEQ ID NO:4. The IL-15Rα protein can have 1, 2, 3, 4, 5, 6, 7, 8 or more amino acid mutations (e.g., substitutions, insertions and/or deletions).

[0172] 4. IL-15/RA Complexes

[0173] As outlined herein, in formats including a sushi domain, the IL-15 variants and the sushi domain can be complexed in a variety of ways, as generally shown in FIGS. 14 and 25, and discussed below in Section III.

[0174] In some embodiments, as shown in FIG. 14C, for example, the IL-15 protein and the IL-15Rα(sushi) are not covalently attached, but rather are self-assembled through regular ligand-ligand interactions. As is more fully described herein, it can be either the IL-15 domain or the sushi domain that is covalently linked to the Fc domain (generally using an optional domain linker). Again, of particular use in this embodiment are a double variant, IL-15 N4D/N65D or D30N/N65D, or a triple variant IL-15, D30N/E64Q/N65D, used with a wild-type sushi domain.

[0175] In alternative embodiments, the variant IL-15 can be complexed (linked) to the sushi domain using a domain linker, such that they are covalently attached as generally shown in FIG. 14B; this figure depicts the sushi domain as the N-terminal domain, although this can be reversed. Again, of particular use in this embodiment are a double variant IL-15, N4D/N65D or D30N/N65D, or a triple variant IL-15, D30N/E64Q/N65D, used with a wild type sushi domain.

[0176] In some cases, each of the IL-15 variant and IL-15Rα(sushi) domain are engineered to contain a cysteine amino acid, that forms a disulfide bond to form the complex, with either the IL-15 domain or the sushi domain being covalently attached (using an optional domain linker) to the Fc domain. Again, of particular use in this embodiment are a double variant IL-15, N4D/N65D or D30N/N65D, (additionally including an amino acid substitution to cysteine), or a triple variant IL-15, D30N/E64Q/N65D (additionally including an amino acid substitution to cysteine), used with a sushi domain also comprising an amino acid substitution to provide a cysteine.

[0177] Additional particular embodiments are outlined below.

[0178] B. Anti-ICOS Components

[0179] The heterodimeric fusion proteins of the invention contain some antibody components, including antigen binding domains that bind to human ICOS, the sequence of which is shown in FIG. 3.

[0180] Traditional antibody structural units typically comprise a tetramer. Each tetramer is typically composed of two identical pairs of polypeptide chains, each pair having one “light” (typically having a molecular weight of about 25 kDa) and one “heavy” chain (typically having a molecular weight of about 50-70 kDa). Human light chains are classified as kappa and lambda light chains. The present invention is directed to antibodies or antibody fragments (antibody monomers) that generally are based on the IgG class, which has several subclasses, including, but not limited to IgG1, IgG2, IgG3, and IgG4. In general, IgG1, IgG2 and IgG4 are used more frequently than IgG3. It should be noted that IgG1 has different allotypes with polymorphisms at 356 (D or E) and 358 (L or M). The sequences depicted herein use the 356D/358M allotype, however the other allotype is included herein. That is, any sequence inclusive of an IgG1 Fc domain included herein can have 356E/358L replacing the 356D/358M allotype.

[0181] In addition, many of the monomer sequences herein have at least one the cysteines at position 220 replaced by a serine, to reduce disulfide formation. Specifically included within the sequences herein are one or both of these cysteines replaced (C220S).

[0182] Thus, “isotype” as used herein is meant any of the subclasses of immunoglobulins defined by the chemical and antigenic characteristics of their constant regions.

[0183] The amino-terminal portion of each chain includes a variable region of about 100 to 110 or more amino acids primarily responsible for antigen recognition, generally referred to in the art and herein as the “Fv domain” or “Fv region”. In the variable region, three loops are gathered for each of the V domains of the heavy chain and light chain to form an antigen-binding site. Each of the loops is referred to as a complementarity-determining region (hereinafter referred to as a “CDR”), in which the variation in the amino acid sequence is most significant. “Variable” refers to the fact that certain segments of the variable region differ extensively in sequence among antibodies. Variability within the variable region is not evenly distributed. Instead, the V regions consist of relatively invariant stretches called framework regions (FRs) of 15-30 amino acids separated by shorter regions of extreme variability called “hypervariable regions” that are each 9-15 amino acids long or longer.

[0184] Each VH and VL is composed of three hypervariable regions (“complementary determining regions,” “CDRs”) and four FRs, arranged from amino-terminus to carboxy-terminus in the following order: FR1-CDR1-FR2-CDR2-FR3-CDR3-FR4.

[0185] The hypervariable region generally encompasses amino acid residues from about amino acid residues 24-34 (LCDR1; “L” denotes light chain), 50-56 (LCDR2) and 89-97 (LCDR3) in the light chain variable region and around about 31-35B (HCDR1; “H” denotes heavy chain), 50-65 (HCDR2), and 95-102 (HCDR3) in the heavy chain variable region; Kabat et al., SEQUENCES OF PROTEINS OF IMMUNOLOGICAL INTEREST, 5th Ed. Public Health Service, National Institutes of Health, Bethesda, Md. (1991) and/or those residues forming a hypervariable loop (e.g. residues 26-32 (LCDR1), 50-52 (LCDR2) and 91-96 (LCDR3) in the light chain variable region and 26-32 (HCDR1), 53-55 (HCDR2) and 96-101 (HCDR3) in the heavy chain variable region; Chothia and Lesk (1987) J. Mol. Biol. 196:901-917. Specific CDRs of the invention are described below.

[0186] As will be appreciated by those in the art, the exact numbering and placement of the CDRs can be different among different numbering systems. However, it should be understood that the disclosure of a variable heavy and/or variable light sequence includes the disclosure of the associated (inherent) CDRs. Accordingly, the disclosure of each variable heavy region is a disclosure of the vhCDRs (e.g. vhCDR1, vhCDR2 and vhCDR3) and the disclosure of each variable light region is a disclosure of the vlCDRs (e.g. vlCDR1, vlCDR2 and vlCDR3).

[0187] A useful comparison of CDR numbering is as below, see Lafranc et al., Dev. Comp. Immunol. 27(1):55-77 (2003):

TABLE 1

| | Kabat+ | | | | | | |
|---|---|---|---|---|---|---|---|
| | Chothia | IMGT | Kabat | AbM | Chothia | Contact | Xencor |
| vhCDR1 | 26-35 | 27-38 | 31-35 | 26-35 | 26-32 | 30-35 | 27-35 |
| vhCDR2 | 50-65 | 56-65 | 50-65 | 50-58 | 52-56 | 47-58 | 54-61 |
| vhCDR3 | 95-102 | 105-117 | 95-102 | 95-102 | 95-102 | 93-101 | 103-116 |
| vlCDR1 | 24-34 | 27-38 | 24-34 | 24-34 | 24-34 | 30-36 | 27-38 |
| vlCDR2 | 50-56 | 56-65 | 50-56 | 50-56 | 50-56 | 46-55 | 56-62 |
| vlCDR3 | 89-97 | 105-117 | 89-97 | 89-97 | 89-97 | 89-96 | 97-105 |

[0188] Throughout the present specification, the Kabat numbering system is generally used when referring to a residue in the variable domain (approximately, residues 1-107 of the light chain variable region and residues 1-113 of the heavy chain variable region) and the EU numbering system for Fc regions (e.g., Kabat et al., supra (1991)).

[0189] The present invention provides a large number of different CDR sets. In this case, a “full CDR set” comprises the three variable light and three variable heavy CDRs, e.g. a vlCDR1, vlCDR2, vlCDR3, vhCDR1, vhCDR2 and vhCDR3. These can be part of a larger variable light or variable heavy domain, respectfully. In addition, as more fully outlined herein, the variable heavy and variable light domains can be on separate polypeptide chains, when a heavy and light chain is used (for example when Fabs are used), or on a single polypeptide chain in the case of scFv sequences.

[0190] The CDRs contribute to the formation of the antigen-binding, or more specifically, epitope binding site of antibodies. “Epitope” refers to a determinant that interacts with a specific antigen binding site in the variable region of an antibody molecule known as a paratope. Epitopes are groupings of molecules such as amino acids or sugar side chains and usually have specific structural characteristics, as well as specific charge characteristics. A single antigen may have more than one epitope.

[0191] The epitope may comprise amino acid residues directly involved in the binding (also called immunodominant component of the epitope) and other amino acid residues, which are not directly involved in the binding, such as amino acid residues which are effectively blocked by the specifically antigen binding peptide; in other words, the amino acid residue is within the footprint of the specifically antigen binding peptide.

[0192] Epitopes may be either conformational or linear. A conformational epitope is produced by spatially juxtaposed amino acids from different segments of the linear polypeptide chain. A linear epitope is one produced by adjacent amino acid residues in a polypeptide chain. Conformational and nonconformational epitopes may be distinguished in that the binding to the former but not the latter is lost in the presence of denaturing solvents.

[0193] An epitope typically includes at least 3, and more usually, at least 5 or 8-10 amino acids in a unique spatial conformation. Antibodies that recognize the same epitope can be verified in a simple immunoassay showing the ability of one antibody to block the binding of another antibody to a target antigen, for example “binning.” As outlined below, the invention not only includes the enumerated antigen binding domains and antibodies herein, but those that compete for binding with the epitopes bound by the enumerated antigen binding domains.

[0194] The carboxy-terminal portion of each chain defines a constant region primarily responsible for effector function. Kabat et al. collected numerous primary sequences of the variable regions of heavy chains and light chains. Based on the degree of conservation of the sequences, they classified individual primary sequences into the CDR and the framework and made a list thereof (see SEQUENCES OF IMMUNOLOGICAL INTEREST, 5th edition, NIH publication, No. 91-3242, E. A. Kabat et al., entirely incorporated by reference).

[0195] In the IgG subclass of immunoglobulins, there are several immunoglobulin domains in the heavy chain. By “immunoglobulin (Ig) domain” herein is meant a region of an immunoglobulin having a distinct tertiary structure. Of interest in the present invention are the heavy chain domains, including, the constant heavy (CH) domains and the hinge domains. In the context of IgG antibodies, the IgG isotypes each have three CH regions. Accordingly, “CH” domains in the context of IgG are as follows: “CH1” refers to positions 118-220 according to the EU index as in Kabat. “CH2” refers to positions 237-340 according to the EU index as in Kabat, and “CH3” refers to positions 341-447 according to the EU index as in Kabat. As shown herein and described below, the pI variants can be in one or more of the CH regions, as well as the hinge region, discussed below.

[0196] Another type of Ig domain of the heavy chain is the hinge region. By “hinge” or “hinge region” or “antibody hinge region” or “immunoglobulin hinge region” herein is meant the flexible polypeptide comprising the amino acids between the first and second constant domains of an antibody. Structurally, the IgG CH1 domain ends at EU position 220, and the IgG CH2 domain begins at residue EU position 237. Thus for IgG the antibody hinge is herein defined to include positions 221 (D221 in IgG1) to 236 (G236 in IgG1), wherein the numbering is according to the EU index as in Kabat. In some embodiments, for example in the context of an Fc region, the lower hinge is included, with the “lower hinge” generally referring to positions 226 or 230. As noted herein, pI variants can be made in the hinge region as well.

[0197] The light chain generally comprises two domains, the variable light domain (containing the light chain CDRs and together with the variable heavy domains forming the Fv region), and a constant light chain region (often referred to as CL or Cκ).

[0198] Another region of interest for additional substitutions, outlined herein, is the Fc region.

[0199] Thus, the present invention provides different antibody domains. As described herein and known in the art, the heterodimeric antibodies of the invention comprise different domains within the heavy and light chains, which can be overlapping as well. These domains include, but are not limited to, the Fc domain, the CH1 domain, the CH2 domain, the CH3 domain, the hinge domain, the heavy constant domain (CH1-hinge-Fc domain or CH1-hinge-CH2-CH3), the variable heavy domain, the variable light domain, the light constant domain, Fab domains and scFv domains.

[0200] As generally outlined herein, the heterodimeric fusion proteins of the invention include an Fv that binds human ICOS. This Fv, or anti-ICOS component (the anti-ICOS antigen binding domain or ABD) of the invention is generally a set of 6 CDRs and/or a variable heavy domain and a variable light domain that form an Fv domain that can bind human ICOS. As described herein, there are a number of different formats that can be used, generally either by using a scFv or a Fab as outlined herein.

[0201] In certain embodiments, the ABDs of the invention comprise a heavy chain variable region with frameworks from a particular germline heavy chain immunoglobulin gene and/or a light chain variable region from a particular germline light chain immunoglobulin gene. For example, such ABDs may comprise or consist of a human ABD comprising heavy or light chain variable regions that are “the product of” or “derived from” a particular germline sequence. An ABD that is “the product of” or “derived from” a human germline immunoglobulin sequence can be identified as such by comparing the amino acid sequence of the ABD to the amino acid sequences of human germline immunoglobulins and selecting the human germline immunoglobulin sequence that is closest in sequence (i.e., greatest % identity) to the sequence of the ABD. An ABD that is “the product of” or “derived from” a particular human germline immunoglobulin sequence may contain amino acid differences as compared to the germline sequence, due to, for example, CDRs, naturally-occurring somatic mutations or intentional introduction of site-directed mutation. However, a humanized ABD typically is at least 90% identical in amino acids sequence to an amino acid sequence encoded by a human germline immunoglobulin gene and contains amino acid residues that identify the ABD as being derived from human sequences when compared to the germline immunoglobulin amino acid sequences of other species (e.g., murine germline sequences). In certain cases, a humanized ABD may be at least 95%, 96%, 97%, 98%, or 99%, or even at least 96%, 97%, 98%, or 99% identical in amino acid sequence to the amino acid sequence encoded by the germline immunoglobulin gene. Typically, a humanized ABD derived from a particular human germline sequence will display no more than 10-20 amino acid differences from the amino acid sequence encoded by the human germline immunoglobulin gene (prior to the introduction of any skew, pI and ablation variants herein; that is, the number of variants is generally low, prior to the introduction of the variants of the invention). In certain cases, the humanized ABD may display no more than 5, or even no more than 4, 3, 2, or 1 amino acid difference from the amino acid sequence encoded by the germline immunoglobulin gene (again, prior to the introduction of any skew, pI and ablation variants herein; that is, the number of variants is generally low, prior to the introduction of the variants of the invention). In one embodiment, the parent ABD has been affinity matured, as is known in the art. Structure-based methods may be employed for humanization and affinity maturation, for example as described in U.S. Ser. No. 11/004,590. Selection based methods may be employed to humanize and/or affinity mature antibody variable regions, including but not limited to methods described in Wu et al., 1999, J. Mol. Biol. 294:151-162; Baca et al., 1997, J. Biol. Chem. 272(16):10678-10684; Rosok et al., 1996, J. Biol. Chem. 271(37): 22611-22618; Rader et al., 1998, Proc. Natl. Acad. Sci. USA 95: 8910-8915; Krauss et al., 2003, Protein Engineering 16(10):753-759, all entirely incorporated by reference. Other humanization methods may involve the grafting of only parts of the CDRs, including but not limited to methods described in U.S. Ser. No. 09/810,510; Tan et al., 2002, J. Immunol. 169:1119-1125; De Pascalis et al., 2002, J. Immunol. 169:3076-3084, all entirely incorporated by reference.

[0202] As shown herein, the ICOS ABD can be in the form of either a Fab or an scFv, with a Fab format being particularly useful in many embodiments as generally shown in FIGS. 25A-CC.

[0203] In some embodiments the ICOS ABD is a scFv, wherein the VH and VL domains are joined using an scFv linker, which can be optionally a charged scFv linker. As will be appreciated by those in the art, the scFv can be assembled from N- to C-terminus as N-vh-scFv linker-vl-C or as N-vl-scFv linker-vh-C, with the C terminus of the scFv domain generally being linked to the hinge-CH2-CH3 Fc domain, wherein the hinge in this case serving as a domain linker. Suitable Fvs (including CDR sets and variable heavy/variable light domains) can be used in scFv formats or Fab formats are shown in the Figures.

[0204] As will further be appreciated by those in the art, all or part of the hinge (which can also be a wild type hinge from IgG1, IgG2 or IgG4 or a variant thereof, such as the IgG4 S241P or S228P hinge variant with the substitution proline at position 228 relative to the parent IgG4 hinge polypeptide (wherein the numbering S228P is according to the EU index and the S241P is the Kabat numbering)) can be used as the domain linker between the scFv and the CH2-CH3 domain, or a different domain linker such as depicted in the Figures can be used.

[0205] Alternatively, the ICOS ABD can be in the form of a Fab fragment. In this embodiment, the ABD is made up of a variable heavy domain, contributed by a heavy chain, and a variable light domain, contributed by a light chain. Suitable Fvs (including CDR sets and variable heavy/variable light domains) can be used in scFv formats or Fab formats are shown in the Figures.

[0206] In some embodiments, the anti-ICOS Fab components are the pairs of vh and vl domains as depicted in FIGS. 24, 60, and 62-64. In addition, suitable ICOS vh and vl domains can be found in WO/2018/045110, hereby incorporated by reference in its entirety and specifically for the sequences depicted in FIG. 19, FIG. 20 and FIG. 24, as well as SEQ ID NOs:27869-28086 from the sequence listing that are a number of ICOS Fab sequences (heavy chain VH1-CH1 and light chain VL1-CL) as indicated in the naming nomenclature. Any or all of these may find use in the present invention.

[0207] Accordingly, suitable human ICOS antigen binding domains include, but are not limited to, those listed in FIGS. 24, 60, and 62-64 (e.g., SEQ ID NOs:140-143, 179-242, 315-584) and the sequence listing (e.g., SEQ ID NOs:585-802).

[0208] In some embodiments, the ICOS antigen binding domain (ABD) comprises a variable heavy domain that comprises an amino acid sequence with at least about 95%, about 96%, about 97%, about 98%, or about 99%, sequence identity to the amino acid sequence of the variable heavy domains of a parent ICOS ABD. In some embodiments, the parent ICOS ABD is any of the ICOS ABDs set forth in in FIGS. 24, 60, and 62-64 (e.g., SEQ ID NOs:140-143, 179-242, 315-584) and the sequence listing (e.g., SEQ ID NOs:585-802). In some embodiments, the ICOS ABD retains the binding and/or functional activity of the patent ICOS ABD. In still further embodiments, the ICOS ABD comprises the variable heavy domain sequence of the parent ICOS ABD and has one or more amino acid substitutions, e.g., 1, 2, 3, 4, 5, 1-2, 1-3, 1-4 or 1-5 conservative amino acid substitutions in the heavy variable domain sequence. In yet further embodiments, the one or more amino acid substitutions fall within one or more framework regions of the variable heavy domain sequences of the parent ICOS ABD.

[0209] In particular embodiments, the ICOS ABD comprises a variable heavy domain sequence with at least about 95%, about 96%, about 97%, about 98%, or about 99% sequence identity to a variable heavy domain sequence of a parent ICOS ABD. In some embodiments, the parent ICOS ABD is any one of the ICOS ABDs depicted in FIGS. 24, 60, and 62-64 (e.g., SEQ ID NOs:140-143, 179-242, 315-584) and the sequence listing (e.g., SEQ ID NOs:585-802), comprises one or more amino acid substitutions in a framework region, and retains the binding and/or functional activity of the parent ICOS ABD.

[0210] In particular embodiments, the ICOS ABD comprises a variable light domain sequence with at least about 95%, about 96%, about 97%, about 98%, or about 99% sequence identity to a variable light domain sequence of a parent ICOS ABD (e.g., any one of the ICOS ABDs depicted in FIGS. 24, 60, and 62-64 (e.g., SEQ ID NOs:140-143, 179-242, 315-584) and the sequence listing (e.g., SEQ ID NOs:585-802)), comprises one or more conservative amino acid substitutions in a framework region, and retains the binding and/or functional activity of the parent ICOS ABD. In still further embodiments, the ICOS ABD comprises the variable light domain sequence of a parent ICOS ABD (e.g., any one of the ICOS ABDs depicted in FIGS. 24, 60, and 62-64 (e.g., SEQ ID NOs:140-143, 179-242, 315-584) and the sequence listing (e.g., SEQ ID NOs:585-802)) and has one or more amino acid substitutions, e.g., 1, 2, 3, 4, 5, 1-2, 1-3, 1-4 or 1-5 amino acid substitutions in the variable light domain sequence. In yet further embodiments, the amino acid substitutions fall within one or more framework regions.

[0211] Binding of an ICOS ABD to ICOS (e.g., human ICOS) can be measured by any suitable technique known in the art. In some embodiments, binding is measured by at least one of a Biacore, surface plasmon resonance (SPR) and/or BLI (biolayer interferometry, e.g., Octet assay) assay. In particular embodiments, the ICOS ABD is capable of binding human ICOS.

[0212] C. Fc Domains

[0213] The Fc domain component of the invention is as described herein, which generally contains skew variants and/or optional pI variants and/or ablation variants are outlined herein. See for example the disclosure of WO2017/218707 under the heading “IV Heterodimeric Antibodies”, including sections IV.A, IV.B, IV.C, IV.D, IV.E, IV.F, IV.G, IV.H and IV.I, all of which are expressly incorporated by reference in their entirety. Of particular use in the heterodimeric fusion proteins of the present invention are Fc domains containing “skew variants”, “pI variants”, “ablation variants” and FcRn variants as outlined therein. Particularly useful Fc domains are those shown in FIG. 8. Thus, variant Fc domains derived from IgG1 can be used, as well as IgG4 variants with a S228P variant.

[0214] The Fc domains can be derived from IgG Fc domains, e.g., IgG1, IgG2, IgG3 or IgG4 Fc domains, with IgG1 Fc domains finding particular use in the invention. The following describes Fc domains that are useful for IL-15/IL-15Rα Fc fusion monomers and checkpoint antibody fragments of the targeted IL-15/IL-15Rα heterodimer proteins of the present invention.

[0215] Thus, the “Fc domain” includes the —CH2-CH3 domain, and optionally a hinge domain, and can be from human IgG1, IgG2, IgG3 or IgG4, with Fc domains derived from IgG1. In some of the embodiments herein, when a protein fragment, e.g., IL-15 or IL-15Rα is attached to an Fc domain, it is the C-terminus of the IL-15 or IL-15Rα construct that is attached to all or part of the hinge of the Fc domain; for example, it is generally attached to the sequence EPKS which is the beginning of the hinge. In other embodiments, when a protein fragment, e.g., IL-15 or IL-15Rα, is attached to an Fc domain, it is the C-terminus of the IL-15 or IL-15Rα construct that is attached to the CH1 domain of the Fc domain.

[0216] In some of the constructs and sequences outlined herein of an Fc domain protein, the C-terminus of the IL-15 or IL-15Rα protein fragment is attached to the N-terminus of a domain linker, the C-terminus of which is attached to the N-terminus of a constant Fc domain (N-IL-15 or IL-15Rα protein fragment-linker-Fc domain-C) although that can be switched (N-Fc domain-linker-IL-15 or IL-15Rα protein fragment-C). In other constructs and sequence outlined herein, C-terminus of a first protein fragment is attached to the N-terminus of a second protein fragment, optionally via a domain linker, the C-terminus of the second protein fragment is attached to the N-terminus of a constant Fc domain, optionally via a domain linker. In yet other constructs and sequences outlined herein, a constant Fc domain that is not attached to a first protein fragment or a second protein fragment is provided. A heterodimer Fc fusion protein can contain two or more of the exemplary monomeric Fc domain proteins described herein.

[0217] In some embodiments, the linker is a “domain linker”, used to link any two domains as outlined herein together, some of which are depicted in FIG. 9. While any suitable linker can be used, many embodiments utilize a glycine-serine polymer, including for example (GS)n, (GSGGS)n, (GGGGS)n, (GGGS)n, (GA)n, (GGGGA)n and (GGGA)n, where n is an integer of at least one (and generally from 1 to 2 to 3 to 4 to 5) as well as any peptide sequence that allows for recombinant attachment of the two domains with sufficient length and flexibility to allow each domain to retain its biological function. In some cases, and with attention being paid to “strandedness”, as outlined below, charged domain linkers.

[0218] In one embodiment, heterodimeric Fc fusion proteins contain at least two constant domains which can be engineered to produce heterodimers, such as pI engineering. Other Fc domains that can be used include fragments that contain one or more of the CH1, CH2, CH3, and hinge domains of the invention that have been pI engineered. In particular, the formats depicted in FIG. 14 and FIG. 32 are heterodimeric Fc fusion proteins, meaning that the protein has two associated Fc sequences self-assembled into a heterodimeric Fc domain and at least one fusion protein (e.g., 1, 2 or more fusion proteins) as more fully described below. In some cases, a first fusion protein is linked to a first Fc sequence and a second fusion protein is linked to a second Fc sequence. In other cases, a first fusion protein is linked to a first Fc sequence, and the first fusion protein is non-covalently attached to a second fusion protein that is not linked to an Fc sequence. In some cases, the heterodimeric Fc fusion protein contains a first fusion protein linked to a second fusion protein which is linked a first Fc sequence, and a second Fc sequence that is not linked to either the first or second fusion proteins.

[0219] Accordingly, in some embodiments the present invention provides heterodimeric Fc fusion proteins that rely on the use of two different heavy chain variant Fc sequences, that will self-assemble to form a heterodimeric Fc domain fusion polypeptide.

[0220] The present invention is directed to novel constructs to provide heterodimeric Fc fusion proteins that allow binding to one or more binding partners, ligands or receptors. The heterodimeric Fc fusion constructs are based on the self-assembling nature of the two Fc domains of the heavy chains of antibodies, e.g., two “monomers” that assemble into a “dimer”. Heterodimeric Fc fusions are made by altering the amino acid sequence of each monomer as more fully discussed below. Thus, the present invention is generally directed to the creation of heterodimeric Fc fusion proteins which can co-engage binding partner(s) or ligand(s) or receptor(s) in several ways, relying on amino acid variants in the constant regions that are different on each chain to promote heterodimeric formation and/or allow for ease of purification of heterodimers over the homodimers.

[0221] There are a number of mechanisms that can be used to generate the heterodimers of the present invention. In addition, as will be appreciated by those in the art, these mechanisms can be combined to ensure high heterodimerization. Thus, amino acid variants that lead to the production of heterodimers are referred to as “heterodimerization variants”, a number of which are shown in FIG. 4A-FIG. 4E. As discussed below, heterodimerization variants can include steric variants (e.g. the “knobs and holes” or “skew” variants described below and the “charge pairs” variants described below) as well as “pI variants”, which allows purification of homodimers away from heterodimers, as depicted in FIG. 5. As is generally described in WO2014/145806, hereby incorporated by reference in its entirety and specifically as below for the discussion of “heterodimerization variants”, useful mechanisms for heterodimerization include “knobs and holes” (“KIH”; sometimes herein as “skew” variants (see discussion in WO2014/145806), “electrostatic steering” or “charge pairs” as described in WO2014/145806, pI variants as described in WO2014/145806, and general additional Fc variants as outlined in WO2014/145806 and below.

[0222] In the present invention, there are several basic mechanisms that can lead to ease of purifying heterodimeric fusion proteins; one relies on the use of pI variants, such that each monomer has a different pI, thus allowing the isoelectric purification of A-A, A-B and B-B dimeric proteins. Alternatively, some formats also allow separation on the basis of size. As is further outlined below, it is also possible to “skew” the formation of heterodimers over homodimers. Thus, a combination of steric heterodimerization variants and pI or charge pair variants find particular use in the invention.

[0223] In general, embodiments of particular use in the present invention rely on sets of variants that include skew variants, that encourage heterodimerization formation over homodimerization formation, coupled with pI variants, which increase the pI difference between the two monomers.

[0224] Additionally, as more fully outlined below, depending on the format of the heterodimer Fc fusion protein, pI variants can be either contained within the constant and/or Fc domains of a monomer, or domain linkers can be used. That is, the invention provides pI variants that are on one or both of the monomers, and/or charged domain linkers as well. In addition, additional amino acid engineering for alternative functionalities may also confer pI changes, such as Fc, FcRn and KO variants.

[0225] In the present invention that utilizes pI as a separation mechanism to allow the purification of heterodimeric fusion proteins, amino acid variants can be introduced into one or both of the monomer polypeptides; that is, the pI of one of the monomers (referred to herein for simplicity as “monomer A”) can be engineered away from monomer B, or both monomer A and B change be changed, with the pI of monomer A increasing and the pI of monomer B decreasing. As discussed, the pI changes of either or both monomers can be done by removing or adding a charged residue (e.g., a neutral amino acid is replaced by a positively or negatively charged amino acid residue, e.g., glycine to glutamic acid), changing a charged residue from positive or negative to the opposite charge (e.g. aspartic acid to lysine) or changing a charged residue to a neutral residue (e.g., loss of a charge; lysine to serine). A number of these variants are shown in the Figures (see FIG. 5).

[0226] Accordingly, this embodiment of the present invention provides for creating a sufficient change in pI in at least one of the monomers such that heterodimers can be separated from homodimers. As will be appreciated by those in the art, and as discussed further below, this can be done by using a “wild type” heavy chain constant region and a variant region that has been engineered to either increase or decrease its pI (wt A−+B or wt A−−B), or by increasing one region and decreasing the other region (A+ −B− or A− B+).

[0227] Thus, in general, a component of some embodiments of the present invention are amino acid variants in the constant regions that are directed to altering the isoelectric point (pI) of at least one, if not both, of the monomers of a dimeric protein by incorporating amino acid substitutions (“pI variants” or “pI substitutions”) into one or both of the monomers. As shown herein, the separation of the heterodimers from the two homodimers can be accomplished if the pIs of the two monomers differ by as little as 0.1 pH unit, with 0.2, 0.3, 0.4 and 0.5 or greater all finding use in the present invention.

[0228] As will be appreciated by those in the art, the number of pI variants to be included on each or both monomer(s) to get good separation will depend in part on the starting pI of the components. As is known in the art, different Fcs will have different starting pIs which are exploited in the present invention. In general, as outlined herein, the pIs are engineered to result in a total pI difference of each monomer of at least about 0.1 logs, with 0.2 to 0.5 being preferred as outlined herein.

[0229] As will be appreciated by those in the art, the number of pI variants to be included on each or both monomer(s) to get good separation will depend in part on the starting pI of the components. That is, to determine which monomer to engineer or in which “direction” (e.g., more positive or more negative), the sequences of the Fc domains, and in some cases, the protein domain(s) linked to the Fc domain are calculated and a decision is made from there. As is known in the art, different Fc domains and/or protein domains will have different starting pIs which are exploited in the present invention. In general, as outlined herein, the pIs are engineered to result in a total pI difference of each monomer of at least about 0.1 logs, with 0.2 to 0.5 being preferred as outlined herein.

[0230] Furthermore, as will be appreciated by those in the art and outlined herein, in some embodiments, heterodimers can be separated from homodimers on the basis of size. As shown in the Figures, for example, several of the formats allow separation of heterodimers and homodimers on the basis of size.

[0231] In the case where pI variants are used to achieve heterodimerization, by using the constant region(s) of Fc domains(s), a more modular approach to designing and purifying heterodimeric Fc fusion proteins is provided. Thus, in some embodiments, heterodimerization variants (including skew and purification heterodimerization variants) must be engineered. In addition, in some embodiments, the possibility of immunogenicity resulting from the pI variants is significantly reduced by importing pI variants from different IgG isotypes such that pI is changed without introducing significant immunogenicity. Thus, an additional problem to be solved is the elucidation of low pI constant domains with high human sequence content, e.g. the minimization or avoidance of non-human residues at any particular position.

[0232] In addition, it should be noted that the pI variants of the heterodimerization variants give an additional benefit for the analytics and quality control process of Fc fusion proteins, as the ability to either eliminate, minimize and distinguish when homodimers are present is significant. Similarly, the ability to reliably test the reproducibility of the heterodimeric Fc fusion protein production is important.

[0233] 1. Heterodimerization Variants

[0234] The present invention provides heterodimeric fusion proteins, including heterodimeric Fc fusion proteins in a variety of formats, which utilize heterodimeric variants to allow for heterodimeric formation and/or purification away from homodimers. The heterodimeric fusion constructs are based on the self-assembling nature of the two Fc domains, e.g., two “monomers” that assemble into a “dimer”.

[0235] There are a number of suitable pairs of sets of heterodimerization skew variants. These variants come in “pairs” of “sets”. That is, one set of the pair is incorporated into the first monomer and the other set of the pair is incorporated into the second monomer. It should be noted that these sets do not necessarily behave as “knobs in holes” variants, with a one-to-one correspondence between a residue on one monomer and a residue on the other; that is, these pairs of sets form an interface between the two monomers that encourages heterodimer formation and discourages homodimer formation, allowing the percentage of heterodimers that spontaneously form under biological conditions to be over 90%, rather than the expected 50% (25 homodimer A/A:50% heterodimer A/B:25% homodimer B/B).

[0236] 2. Steric Variants

[0237] In some embodiments, the formation of heterodimers can be facilitated by the addition of steric variants. That is, by changing amino acids in each heavy chain, different heavy chains are more likely to associate to form the heterodimeric structure than to form homodimers with the same Fc amino acid sequences. Suitable steric variants are included in in the FIG. 29 of U.S. Ser. No. 15/141,350, all of which is hereby incorporated by reference in its entirety, as well as in FIG. 4A-FIG. 4E.

[0238] One mechanism is generally referred to in the art as “knobs and holes”, referring to amino acid engineering that creates steric influences to favor heterodimeric formation and disfavor homodimeric formation can also optionally be used; this is sometimes referred to as “knobs and holes”, as described in U.S. Ser. No. 61/596,846, Ridgway et al., Protein Engineering 9(7):617 (1996); Atwell et al., J. Mol. Biol. 1997 270:26; U.S. Pat. No. 8,216,805, all of which are hereby incorporated by reference in their entirety. The Figures identify a number of “monomer A-monomer B” pairs that rely on “knobs and holes”. In addition, as described in Merchant et al., Nature Biotech. 16:677 (1998), these “knobs and hole” mutations can be combined with disulfide bonds to skew formation to heterodimerization.

[0239] An additional mechanism that finds use in the generation of heterodimers is sometimes referred to as “electrostatic steering” as described in Gunasekaran et al., J. Biol. Chem. 285(25):19637 (2010), hereby incorporated by reference in its entirety. This is sometimes referred to herein as “charge pairs”. In this embodiment, electrostatics are used to skew the formation towards heterodimerization. As those in the art will appreciate, these may also have an effect on pI, and thus on purification, and thus could in some cases also be considered pI variants. However, as these were generated to force heterodimerization and were not used as purification tools, they are classified as “steric variants”. These include, but are not limited to, D221E/P228E/L368E paired with D221R/P228R/K409R (e.g., these are “monomer corresponding sets) and C220E/P228E/368E paired with C220R/E224R/P228R/K409R.

[0240] Additional monomer A and monomer B variants that can be combined with other variants, optionally and independently in any amount, such as pI variants outlined herein or other steric variants that are shown in FIG. 37 of US 2012/0149876, all of which are incorporated expressly by reference herein.

[0241] In some embodiments, the steric variants outlined herein can be optionally and independently incorporated with any pI variant (or other variants such as Fc variants, FcRn variants, etc.) into one or both monomers, and can be independently and optionally included or excluded from the proteins of the invention.

[0242] A list of suitable skew variants is found in FIG. 4A-FIG. 4E. Of particular use in many embodiments are the pairs of sets including, but not limited to, S364K/E357Q:L368D/K370S; L368D/K370S:S364K; L368E/K370S:S364K; T411E/K360E/Q362E:D401K; L368D/K370S:S364K/E357L, K370S:S364K/E357Q and T366S/L368A/Y407V:T366W (optionally including a bridging disulfide, T366S/L368A/Y407V/Y349C:T366W/S354C or T366S/L368A/Y407V/S354C:T366W:Y349C). In terms of nomenclature, the pair “S364K/E357Q:L368D/K370S” means that one of the monomers has the double variant set S364K/E357Q and the other has the double variant set L368D/K370S; as above, the “strandedness” of these pairs depends on the starting pI.

[0243] 3. pI (Isoelectric Point) Variants for Heterodimers

[0244] In general, as will be appreciated by those in the art, there are two general categories of pI variants: those that increase the pI of the protein (basic changes) and those that decrease the pI of the protein (acidic changes). As described herein, all combinations of these variants can be done: one monomer may be wild type, or a variant that does not display a significantly different pI from wild-type, and the other can be either more basic or more acidic. Alternatively, each monomer is changed, one to more basic and one to more acidic.

[0245] Preferred combinations of pI variants are shown in FIG. 30 of U.S. Ser. No. 15/141,350, all of which are herein incorporated by reference in its entirety. As outlined herein and shown in the figures, these changes are shown relative to IgG1, but all isotypes can be altered this way, as well as isotype hybrids. In the case where the heavy chain constant domain is from IgG2-4, R133E and R133Q can also be used.

[0246] In one embodiment, a preferred combination of pI variants has one monomer comprising 208D/295E/384D/418E/421D variants (N208D/Q295E/N384D/Q418E/N421D when relative to human IgG1). In some instances, the second monomer comprises a positively charged domain linker, including (GKPGS)₄, particularly when scFv constructs are used. In some cases, the first monomer includes a CH1 domain, including position 208. Accordingly, in constructs that do not include a CH1 domain (for example for heterodimeric Fc fusion proteins that do not utilize a CH1 domain on one of the domains), a preferred negative pI variant Fc set includes 295E/384D/418E/421D variants (Q295E/N384D/Q418E/N421D when relative to human IgG1).

[0247] In some embodiments, mutations are made in the hinge domain of the Fc domain, including positions 221, 222, 223, 224, 225, 233, 234, 235 and 236. It should be noted that changes in 233-236 can be made to increase effector function (along with 327A) in the IgG2 backbone. Thus, pI mutations and particularly substitutions can be made in one or more of positions 221-225, with 1, 2, 3, 4 or 5 mutations finding use in the present invention. Again, all possible combinations are contemplated, alone or with other pI variants in other domains.

[0248] Specific substitutions that find use in lowering the pI of hinge domains include, but are not limited to, a deletion at position 221, a non-native valine or threonine at position 222, a deletion at position 223, a non-native glutamic acid at position 224, a deletion at position 225, a deletion at position 235 and a deletion or a non-native alanine at position 236. In some cases, only pI substitutions are done in the hinge domain, and in others, these substitution(s) are added to other pI variants in other domains in any combination.

[0249] In some embodiments, mutations can be made in the CH2 region, including positions 274, 296, 300, 309, 320, 322, 326, 327, 334 and 339. Again, all possible combinations of these 10 positions can be made; e.g., a pI antibody may have 1, 2, 3, 4, 5, 6, 7, 8, 9 or 10 CH2 pI substitutions.

[0250] Specific substitutions that find use in lowering the pI of CH2 domains include, but are not limited to, a non-native glutamine or glutamic acid at position 274, a non-native phenylalanine at position 296, a non-native phenylalanine at position 300, a non-native valine at position 309, a non-native glutamic acid at position 320, a non-native glutamic acid at position 322, a non-native glutamic acid at position 326, a non-native glycine at position 327, a non-native glutamic acid at position 334, a non-native threonine at position 339, and all possible combinations within CH2 and with other domains.

[0251] In this embodiment, the mutations can be independently and optionally selected from position 355, 359, 362, 384, 389,392, 397, 418, 419, 444 and 447. Specific substitutions that find use in lowering the pI of CH3 domains include, but are not limited to, a non-native glutamine or glutamic acid at position 355, a non-native serine at position 384, a non-native asparagine or glutamic acid at position 392, a non-native methionine at position 397, a non-native glutamic acid at position 419, a non-native glutamic acid at position 359, a non-native glutamic acid at position 362, a non-native glutamic acid at position 389, a non-native glutamic acid at position 418, a non-native glutamic acid at position 444, and a deletion or non-native aspartic acid at position 447. Exemplary embodiments of pI variants are provided in FIG. 5.

[0252] 4. Isotypic Variants

[0253] In addition, many embodiments of the invention rely on the “importation” of pI amino acids at particular positions from one IgG isotype into another, thus reducing or eliminating the possibility of unwanted immunogenicity being introduced into the variants. A number of these are shown in FIG. 21 of US Publ. App. No. 2014/0370013, hereby incorporated by reference. That is, IgG1 is a common isotype for therapeutic antibodies for a variety of reasons, including high effector function. However, the heavy constant region of IgG1 has a higher pI than that of IgG2 (8.10 versus 7.31). By introducing IgG2 residues at particular positions into the IgG1 backbone, the pI of the resulting monomer is lowered (or increased) and additionally exhibits longer serum half-life. For example, IgG1 has a glycine (pI 5.97) at position 137, and IgG2 has a glutamic acid (pI 3.22); importing the glutamic acid will affect the pI of the resulting protein. As is described below, a number of amino acid substitutions are generally required to significant affect the pI of the variant Fc fusion protein. However, it should be noted as discussed below that even changes in IgG2 molecules allow for increased serum half-life.

[0254] In other embodiments, non-isotypic amino acid changes are made, either to reduce the overall charge state of the resulting protein (e.g., by changing a higher pI amino acid to a lower pI amino acid), or to allow accommodations in structure for stability, etc. as is further described below.

[0255] In addition, by pI engineering both the heavy and light constant domains, significant changes in each monomer of the heterodimer can be seen. As discussed herein, having the pIs of the two monomers differ by at least 0.5 can allow separation by ion exchange chromatography or isoelectric focusing, or other methods sensitive to isoelectric point.

[0256] 5. Calculating pI

[0257] The pI of each monomer can depend on the pI of the variant heavy chain constant domain and the pI of the total monomer, including the variant heavy chain constant domain and the fusion partner. Thus, in some embodiments, the change in pI is calculated on the basis of the variant heavy chain constant domain, using the chart in the FIG. 19 of US2014/0370013. As discussed herein, which monomer to engineer is generally decided by the inherent pI of each monomer.

[0258] 6. Additional Fc Variants for Additional Functionality

[0259] In addition to pI amino acid variants, there are a number of useful Fc amino acid modification that can be made for a variety of reasons, including, but not limited to, altering binding to one or more FcγR receptors, altered binding to FcRn receptors, etc.

[0260] Accordingly, the proteins of the invention can include amino acid modifications, including the heterodimerization variants outlined herein, which includes the pI variants and steric variants. Each set of variants can be independently and optionally included or excluded from any particular heterodimeric fusion protein.

[0261] a. FcγR Variants

[0262] Accordingly, there are a number of useful Fc substitutions that can be made to alter binding to one or more of the FcγR receptors. Substitutions that result in increased binding as well as decreased binding can be useful. For example, it is known that increased binding to FcγRIIIa results in increased ADCC (antibody dependent cell-mediated cytotoxicity; the cell-mediated reaction wherein nonspecific cytotoxic cells that express FcγRs recognize bound antibody on a target cell and subsequently cause lysis of the target cell). Similarly, decreased binding to FcγRIIb (an inhibitory receptor) can be beneficial as well in some circumstances. Amino acid substitutions that find use in the present invention include those listed in U.S. Ser. No. 11/124,620 (particularly FIG. 41), Ser. Nos. 11/174,287, 11/396,495, 11/538,406, all of which are expressly incorporated herein by reference in their entirety and specifically for the variants disclosed therein. Particular variants that find use include, but are not limited to, 236A, 239D, 239E, 332E, 332D, 239D/332E, 267D, 267E, 328F, 267E/328F, 236A/332E, 239D/332E/330L, 239D, 332E/330L, 243A, 243L, 264A, 264V and 299T.

[0263] In addition, amino acid substitutions that increase affinity for FcγRIIc can also be included in the Fc domain variants outlined herein. The substitutions described in, for example, U.S. Ser. Nos. 11/124,620 and 14/578,305 are useful.

[0264] In addition, there are additional Fc substitutions that find use in increased binding to the FcRn receptor and increased serum half-life, as specifically disclosed in U.S. Ser. No. 12/341,769, hereby incorporated by reference in its entirety, including, but not limited to, 434S, 434A, 428L, 308F, 259I, 428L/434S, 428L/434A, 259I/308F, 436I/428L, 436I or V/434S, 436V/428L, 259I/308F/428L, M252Y/S254T/T256E, H433K/N434F and L309D/Q311H/N434S.

[0265] b. Ablation Variants

[0266] Similarly, another category of functional variants includes “FcγR ablation variants” or “Fc knock out (FcKO or KO)” variants. In these embodiments, for some therapeutic applications, it is desirable to reduce or remove the normal binding of the Fc domain to one or more or all of the Fcγ receptors (e.g., FcγR1, FcγRIIa, FcγRIIb, FcγRIIIa, etc.) to avoid additional mechanisms of action. That is, for example, in many embodiments, particularly in the use of bispecific immunomodulatory antibodies desirable to ablate FcγRIIIa binding to eliminate or significantly reduce ADCC activity such that one of the Fc domains comprises one or more Fcγ receptor ablation variants. These ablation variants are depicted in FIG. 31 of U.S. Ser. No. 15/141,350, all of which are herein incorporated by reference in its entirety, and each can be independently and optionally included or excluded, with preferred aspects utilizing ablation variants selected from the group consisting of G236R/L328R, E233P/L234V/L235A/G236del/S239K, E233P/L234V/L235A/G236del/S267K, E233P/L234V/L235A/G236del/S239K/A327G, E233P/L234V/L235A/G236del/S267K/A327G and E233P/L234V/L235A/G236del, according to the EU index. It should be noted that the ablation variants referenced herein ablate FcγR binding but generally not FcRn binding.

[0267] Exemplary embodiments of ablation variants are provided in FIG. 5.

[0268] c. Combination of Heterodimeric and Fc Variants

[0269] As will be appreciated by those in the art, all of the recited heterodimerization variants (including skew and/or pI variants) can be optionally and independently combined in any way, as long as they retain their “strandedness” or “monomer partition”. In addition, all of these variants can be combined into any of the heterodimerization formats.

[0270] In the case of pI variants, while embodiments finding particular use are shown in the Figures, other combinations can be generated, following the basic rule of altering the pI difference between two monomers to facilitate purification.

[0271] In addition, any of the heterodimerization variants, skew and pI, are also independently and optionally combined with Fc ablation variants, Fc variants, FcRn variants, as generally outlined herein.

[0272] In addition, a monomeric Fc domain can comprise a set of amino acid substitutions that includes C220S/S267K/L368D/K370S or C220S/S267K/S364K/E357Q.

[0273] In addition, the heterodimeric Fc fusion proteins can comprise skew variants (e.g., a set of amino acid substitutions as shown in FIGS. 1A-1C of U.S. Ser. No. 15/141,350, all of which are herein incorporated by reference in its entirety), with particularly useful skew variants being selected from the group consisting of S364K/E357Q:L368D/K370S; L368D/K370S:S364K; L368E/K370S:S364K; T411E/Q362E:D401K; L368D/K370S:S364K/E357L, K370S:S364K/E357Q, T366S/L368A/Y407V:T366W, T366S/L368A/Y407V/S354C:T366W/Y349C and T366S/L368A/Y407V/Y349C:T366W/S354C, optionally ablation variants, optionally charged domain linkers and the heavy chain comprises pI variants.

[0274] In some embodiments, the Fc domain comprising an amino acid substitution selected from the group consisting of: 236R, 239D, 239E, 243L, M252Y, V259I, 267D, 267E, 298A, V308F, 328F, 328R, 330L, 332D, 332E, M428L, N434A, N434S, 236R/328R, 239D/332E, M428L, 236R/328F, V259I/V308F, 267E/328F, M428L/N434S, Y436I/M428L, Y436V/M428L, Y436I/N434S, Y436V/N434S, 239D/332E/330L, M252Y/S254T/T256E, V259I/V308F/M428L, E233P/L234V/L235A/G236del/S267K, G236R/L328R and PVA/S267K. In some cases, the Fc domain comprises the amino acid substitution 239D/332E. In other cases, the Fc domain comprises the amino acid substitution G236R/L328R or PVA/S267K.

[0275] In one embodiment, a particular combination of skew and pI variants that finds use in the present invention is T366S/L368A/Y407V:T366W (optionally including a bridging disulfide, T366S/L368A/Y407V/Y349C:T366W/S354C or T366S/L368A/Y407V/S354C:T366W/Y349C) with one monomer comprises Q295E/N384D/Q418E/N481D and the other a positively charged domain linker. As will be appreciated in the art, the “knobs in holes” variants do not change pI, and thus can be used on either monomer.

### III. Useful Formats of ICOS-Targeted x IL-15/IL-15Rα Fc Fusion Proteins

[0276] Provided herein are heterodimeric Fc fusion proteins that can bind to the checkpoint inhibitor ICOS antigen and can complex with the common gamma chain (γc; CD132) and/or the IL-2 receptor β-chain (IL-2Rβ; CD122). In some embodiments, the heterodimeric Fc fusion proteins contain an IL-15/IL-15Rα-Fc fusion protein and an antibody fusion protein. The IL-15/IL-15Rα-Fc fusion protein can include as IL-15 protein (generally including amino acid substitutions) covalently attached to an IL-15Rα, and an Fc domain. Optionally, the IL-15 protein and IL-15Rα protein are noncovalently attached.

[0277] As shown in FIG. 25A-FIG. 25CC, there are a number of useful formats of the targeted IL-15/IL-15Rα heterodimeric fusion proteins of the invention. In general, the heterodimeric fusion proteins of the invention have three functional components: an IL-15/IL-15Rα(sushi) component, an anti-ICOS component, and an Fc component, each of which can take different forms as outlined herein and each of which can be combined with the other components in any configuration. In some embodiments, the anti-ICOS component includes any of the ICOS binding domains provided herein. Suitable human ICOS antigen binding domains for use in the ICOS-targeted x IL-15/IL-15Rα Fc fusion proteins include, but are not limited to, those listed in FIGS. 24, 60, and 62-64 (e.g., SEQ ID NOs:140-143, 179-242, 315-584) and the sequence listing (e.g., SEQ ID NOs:585-802).

[0278] The first and the second Fc domains can have a set of amino acid substitutions selected from the group consisting of a) S267K/L368D/K370S:S267K/S364K/E357Q; b) S364K/E357Q:L368D/K370S; c) L368D/K370S:S364K; d) L368E/K370S:S364K; e) T411E/K360E/Q362E:D401K; f) L368D/K370S:S364K/E357L and g) K370S:S364K/E357Q, according to EU numbering.

[0279] In some embodiments, the first and/or the second Fc domains have an additional set of amino acid substitutions comprising Q295E/N384D/Q418E/N421D, according to EU numbering.

[0280] Optionally, the first and/or the second Fc domains have an additional set of amino acid substitutions consisting of G236R/L328R, E233P/L234V/L235A/G236del/S239K, E233P/L234V/L235A/G236del/S267K, E233P/L234V/L235A/G236del/S239K/A327G, E233P/L234V/L235A/G236del/S267K/A327G and E233P/L234V/L235A/G236del, according to EU numbering.

[0281] Optionally, the first and/or second Fc domains have 428L/434S variants (e.g., M428L/N434S variants) for half-life extension.

[0282] A. scIL15Rα-IL15-Fc x scFv-Fc

[0283] One embodiment is shown in FIG. 25A, and comprises two monomers. The first monomer comprises, from N- to C-terminus, the IL-15Rα(sushi) domain-(domain linker)-IL-15 variant-(domain linker)-CH2-CH3 (with the second domain linker frequently being a hinge domain); and the second monomer comprises VH-scFv linker-VL-hinge-CH2-CH3 or VL-scFv linker-VH-hinge-CH2-CH3, although in either orientation a domain linker can be substituted for the hinge. This is generally referred to as “scIL15Rα-IL15-Fc x scFv-Fc”, with the “sc” standing for “single chain” referring to the attachment of the IL-15 variant and IL-15Rα(sushi) domain using a covalent linker.

[0284] In the scIL15Rα-IL15-Fc x scFv-Fc format, one preferred embodiment utilizes the ICOS ABD having the variable heavy and light domain pair of [ICOS]_H0 and [ICOS]L0 from FIG. 24; [ICOS]_H0.66 and [ICOS]_L0 from FIG. 24; Jmab-136[ICOS]vh and vl from FIG. 60; ICOS 314.8[ICOS]vh and vl from FIG. 60; H2L5[ICOS] vh and vl from FIG. 60; 37A10S713[ICOS] vh and vl from FIG. 60; C398.4A[ICOS] vh and vl from FIG. 60; ICOS.33[ICOS] vh and vl from FIG. 60; STIM001[ICOS] vh and vl from FIG. 60; and STIM003[ICOS] vh and vl from FIG. 60.

[0285] In the scIL15Rα-IL15-Fc x scFv-Fc format, one preferred embodiment utilizes the ICOS ABD having the variable heavy and light domain pair of [ICOS]_H0 and [ICOS]L0 from FIG. 24; [ICOS]_H0.66 and [ICOS]_L0 from FIG. 24; Jmab-136[ICOS]vh and vl from FIG. 60; ICOS 314.8[ICOS]vh and vl from FIG. 60; H2L5[ICOS] vh and vl from FIG. 60; 37A10S713[ICOS] vh and vl from FIG. 60; C398.4A[ICOS] vh and vl from FIG. 60; ICOS.33[ICOS] vh and vl from FIG. 60; STIM001[ICOS] vh and vl from FIG. 60; and STIM003[ICOS] vh and vl from FIG. 60.

[0286] In the scIL15Rα-IL15-Fc x scFv-Fc format, one preferred embodiment utilizes the ICOS ABD having the variable heavy and light domain pair of [ICOS]_H0 and [ICOS]L0 from FIG. 24; [ICOS]_H0.66 and [ICOS]_L0 from FIG. 24; Jmab-136[ICOS]vh and vl from FIG. 60; ICOS 314.8[ICOS]vh and vl from FIG. 60; H2L5[ICOS] vh and vl from FIG. 60; 37A10S713[ICOS] vh and vl from FIG. 60; C398.4A[ICOS] vh and vl from FIG. 60; ICOS.33[ICOS] vh and vl from FIG. 60; STIM001[ICOS] vh and vl from FIG. 60; and STIM003[ICOS] vh and vl from FIG. 60A, with either the IL-15 N4D/N65D variant or the IL-15 D30N/N65D variant or the IL-15 D30N/E64Q/N65D variant.

[0287] In the scIL15Rα-IL15-Fc x scFv-Fc format, one preferred embodiment utilizes the skew variant pair S364K/E357Q:L368D/K370S.

[0288] In the scIL15Rα-IL15-Fc x scFv-Fc format, one preferred embodiment utilizes the ICOS ABD having the variable heavy and light domain pair 2A5B4_H1L1 or the variable heavy and light domain pair 4.1D3.Q1E_H0L0 as shown in FIG. 12 and the skew variant pair S364K/E357Q:L368D/K370S.

[0289] In the scIL15Rα-IL15-Fc x scFv-Fc format, one preferred embodiment utilizes the ICOS ABD having the variable heavy and light domain pair of [ICOS]_H0 and [ICOS]L0 from FIG. 24; [ICOS]_H0.66 and [ICOS]_L0 from FIG. 24; Jmab-136[ICOS]vh and vl from FIG. 60; ICOS 314.8[ICOS]vh and vl from FIG. 60; H2L5[ICOS] vh and vl from FIG. 60; 37A10S713[ICOS] vh and vl from FIG. 60; C398.4A[ICOS] vh and vl from FIG. 60; ICOS.33[ICOS] vh and vl from FIG. 60; STIM001[ICOS] vh and vl from FIG. 60; and STIM003[ICOS] vh and vl from FIG. 60. and the skew variant pair S364K/E357Q:L368D/K370S with either the IL-15 N4D/N65D variant or the IL-15 D30N/N65D variant or the IL-15 D30N/E64Q/N65D variant.

[0290] In the scIL15Rα-IL15-Fc x scFv-Fc format, one preferred embodiment utilizes the ICOS ABD having the variable heavy and light domain pair of [ICOS]_H0 and [ICOS]L0 from FIG. 24; [ICOS]_H0.66 and [ICOS]_L0 from FIG. 24; Jmab-136[ICOS]vh and vl from FIG. 60; ICOS 314.8[ICOS]vh and vl from FIG. 60; H2L5[ICOS] vh and vl from FIG. 60; 37A10S713[ICOS] vh and vl from FIG. 60; C398.4A[ICOS] vh and vl from FIG. 60; ICOS.33[ICOS] vh and vl from FIG. 60; STIM001[ICOS] vh and vl from FIG. 60; and STIM003[ICOS] vh and vl from FIG. 60 and the skew variants S364K/E357Q (on a first Fc-containing monomer) and L368D/K370S (on the second corresponding Fc-containing monomer), the pI variants Q295E/N384D/Q418E/N421D (on either the first or the second Fc-containing monomer), the ablation variants E233P/L234V/L235A/G236_/S267K on both Fc-containing monomers, and optionally the 428L/434S variants on both Fc-containing monomers.

[0291] Additional useful human ICOS antigen binding domains for use in this ICOS-targeted x IL-15/IL-15Rα Fc fusion protein format include, but are not limited to, those listed in FIGS. 24, 60, and 62-64 (e.g., SEQ ID NOs:140-143, 179-242, 315-584) and the sequence listing (e.g., SEQ ID NOs:585-802).

[0292] B. scIL15-IL15Rα-Fc x scFv-Fc

[0293] One embodiment is shown in FIG. 25B, and comprises two monomers. The first monomer comprises, from N- to C-terminus, the IL-15 variant-(domain linker)-IL-15Rα(sushi) domain-(domain linker)-CH2-CH3 (with the second domain linker frequently being a hinge domain), and the second monomer comprises VH-scFv linker-VL-hinge-CH2-CH3 or VL-scFv linker-VH-hinge-CH2-CH3, although in either orientation a domain linker can be substituted for the hinge. This is generally referred to as “scIL15-IL15Rα-Fc x scFv-Fc”, with the “sc” standing for “single chain” referring to the attachment of the IL-15 variant and IL-15Rα(sushi) domain using a covalent linker.

[0294] In the scIL15-IL15Rα-Fc x scFv-Fc format, one preferred embodiment utilizes the ICOS ABD having the variable heavy and light domain pair of [ICOS]_H0 and [ICOS]L0 from FIG. 24; [ICOS]_H0.66 and [ICOS]_L0 from FIG. 24; Jmab-136[ICOS]vh and vl from FIG. 60; ICOS 314.8[ICOS]vh and vl from FIG. 60; H2L5[ICOS] vh and vl from FIG. 60; 37A10S713[ICOS] vh and vl from FIG. 60; C398.4A[ICOS] vh and vl from FIG. 60; ICOS.33[ICOS] vh and vl from FIG. 60; STIM001[ICOS] vh and vl from FIG. 60; and STIM003[ICOS] vh and vl from FIG. 60.

[0295] In the scIL15-IL15Rα-Fc x scFv-Fc format, one preferred embodiment utilizes the ICOS ABD having the variable heavy and light domain pair of [ICOS]_H0 and [ICOS]L0 from FIG. 24; [ICOS]_H0.66 and [ICOS]_L0 from FIG. 24; Jmab-136[ICOS]vh and vl from FIG. 60; ICOS 314.8[ICOS]vh and vl from FIG. 60; H2L5[ICOS] vh and vl from FIG. 60; 37A10S713[ICOS] vh and vl from FIG. 60; C398.4A[ICOS] vh and vl from FIG. 60; ICOS.33[ICOS] vh and vl from FIG. 60; STIM001[ICOS] vh and vl from FIG. 60; and STIM003[ICOS] vh and vl from FIG. 60.

[0296] In the scIL15-IL15Rα-Fc x scFv-Fc format, one preferred embodiment utilizes the ICOS ABD having the variable heavy and light domain pair of [ICOS]_H0 and [ICOS]L0 from FIG. 24; [ICOS]_H0.66 and [ICOS]_L0 from FIG. 24; Jmab-136[ICOS]vh and vl from FIG. 60; ICOS 314.8[ICOS]vh and vl from FIG. 60; H2L5[ICOS] vh and vl from FIG. 60; 37A10S713[ICOS] vh and vl from FIG. 60; C398.4A[ICOS] vh and vl from FIG. 60; ICOS.33[ICOS] vh and vl from FIG. 60; STIM001[ICOS] vh and vl from FIG. 60; and STIM003[ICOS] vh and vl from FIG. 60A, with either the IL-15 N4D/N65D variant or the IL-15 D30N/N65D variant or the IL-15 D30N/E64Q/N65D variant.

[0297] In the scIL15-IL15Rα-Fc x scFv-Fc format, one preferred embodiment utilizes the skew variant pair S364K/E357Q:L368D/K370S.

[0298] In the scIL15-IL15Rα-Fc x scFv-Fc format, one preferred embodiment utilizes the ICOS ABD having the variable heavy and light domain pair 2A5B4_H1L1 or the variable heavy and light domain pair 4.1D3.Q1E_H0L0 as shown in FIG. 12 and the skew variant pair S364K/E357Q:L368D/K370S.

[0299] In the scIL15-IL15Rα-Fc x scFv-Fc format, one preferred embodiment utilizes the ICOS ABD having the variable heavy and light domain pair of [ICOS]_H0 and [ICOS]L0 from FIG. 24; [ICOS]_H0.66 and [ICOS]_L0 from FIG. 24; Jmab-136[ICOS]vh and vl from FIG. 60; ICOS 314.8[ICOS]vh and vl from FIG. 60; H2L5[ICOS] vh and vl from FIG. 60; 37A10S713[ICOS] vh and vl from FIG. 60; C398.4A[ICOS] vh and vl from FIG. 60; ICOS.33[ICOS] vh and vl from FIG. 60; STIM001[ICOS] vh and vl from FIG. 60; and STIM003[ICOS] vh and vl from FIG. 60. and the skew variant pair S364K/E357Q:L368D/K370S with either the IL-15 N4D/N65D variant or the IL-15 D30N/N65D variant or the IL-15 D30N/E64Q/N65D variant.

[0300] In the scIL15-IL15Rα-Fc x scFv-Fc format, one preferred embodiment utilizes the ICOS ABD having the variable heavy and light domain pair of [ICOS]_H0 and [ICOS]L0 from FIG. 24; [ICOS]_H0.66 and [ICOS]_L0 from FIG. 24; Jmab-136[ICOS]vh and vl from FIG. 60; ICOS 314.8[ICOS]vh and vl from FIG. 60; H2L5[ICOS] vh and vl from FIG. 60; 37A10S713[ICOS] vh and vl from FIG. 60; C398.4A[ICOS] vh and vl from FIG. 60; ICOS.33[ICOS] vh and vl from FIG. 60; STIM001[ICOS] vh and vl from FIG. 60; and STIM003[ICOS] vh and vl from FIG. 60 and the skew variants S364K/E357Q (on a first Fc-containing monomer) and L368D/K370S (on the second corresponding Fc-containing monomer), the pI variants Q295E/N384D/Q418E/N421D (on either the first or the second Fc-containing monomer), the ablation variants E233P/L234V/L235A/G236_/S267K on both Fc-containing monomers, and optionally the 428L/434S variants on both Fc-containing monomers.

[0301] Additional useful human ICOS antigen binding domains for use in this ICOS-targeted x IL-15/IL-15Rα Fc fusion protein format include, but are not limited to, those listed in FIGS. 24, 60, and 62-64 (e.g., SEQ ID NOs:140-143, 179-242, 315-584) and the sequence listing (e.g., SEQ ID NOs:585-802).

[0302] C. IL15-Fc x scFv-Fc

[0303] One embodiment is shown in FIG. 25C, and comprises two monomers. The first monomer comprises, from N- to C-terminus, the IL-15 variant-(domain linker)-CH2-CH3 (with the second domain linker frequently being a hinge domain), and the second monomer comprises VH-scFv linker-VL-hinge-CH2-CH3 or VL-scFv linker-VH-hinge-CH2-CH3, although in either orientation a domain linker can be substituted for the hinge. This is generally referred to as “IL15-Fc x scFv-Fc”.

[0304] In the IL15-Fc x scFv-Fc format, one preferred embodiment utilizes the ICOS ABD having the variable heavy and light domain pair of [ICOS]_H0 and [ICOS]L0 from FIG. 24; [ICOS]_H0.66 and [ICOS]_L0 from FIG. 24; Jmab-136[ICOS]vh and vl from FIG. 60; ICOS 314.8[ICOS]vh and vl from FIG. 60; H2L5[ICOS] vh and vl from FIG. 60; 37A10S713[ICOS] vh and vl from FIG. 60; C398.4A[ICOS] vh and vl from FIG. 60; ICOS.33[ICOS] vh and vl from FIG. 60; STIM001[ICOS] vh and vl from FIG. 60; and STIM003[ICOS] vh and vl from FIG. 60.

[0305] In the IL15-Fc x scFv-Fc format, one preferred embodiment utilizes the ICOS ABD having the variable heavy and light domain pair of [ICOS]_H0 and [ICOS]L0 from FIG. 24; [ICOS]_H0.66 and [ICOS]_L0 from FIG. 24; Jmab-136[ICOS]vh and vl from FIG. 60; ICOS 314.8[ICOS]vh and vl from FIG. 60; H2L5[ICOS] vh and vl from FIG. 60; 37A10S713[ICOS] vh and vl from FIG. 60; C398.4A[ICOS] vh and vl from FIG. 60; ICOS.33[ICOS] vh and vl from FIG. 60; STIM001[ICOS] vh and vl from FIG. 60; and STIM003[ICOS] vh and vl from FIG. 60.

[0306] In the IL15-Fc x scFv-Fc format, one preferred embodiment utilizes the ICOS ABD having the variable heavy and light domain pair of [ICOS]_H0 and [ICOS]L0 from FIG. 24; [ICOS]_H0.66 and [ICOS]_L0 from FIG. 24; Jmab-136[ICOS]vh and vl from FIG. 60; ICOS 314.8[ICOS]vh and vl from FIG. 60; H2L5[ICOS] vh and vl from FIG. 60; 37A10S713[ICOS] vh and vl from FIG. 60; C398.4A[ICOS] vh and vl from FIG. 60; ICOS.33[ICOS] vh and vl from FIG. 60; STIM001[ICOS] vh and vl from FIG. 60; and STIM003[ICOS] vh and vl from FIG. 60A, with either the IL-15 N4D/N65D variant or the IL-15 D30N/N65D variant or the IL-15 D30N/E64Q/N65D variant.

[0307] In the IL15-Fc x scFv-Fc format, one preferred embodiment utilizes the skew variant pair S364K/E357Q:L368D/K370S.

[0308] In the IL15-Fc x scFv-Fc format, one preferred embodiment utilizes the ICOS ABD having the variable heavy and light domain pair 2A5B4_H1L1 or the variable heavy and light domain pair 4.1D3.Q1E_H0L0 as shown in FIG. 12 and the skew variant pair S364K/E357Q:L368D/K370S.

[0309] In the IL15-Fc x scFv-Fc format, one preferred embodiment utilizes the ICOS ABD having the variable heavy and light domain pair of [ICOS]_H0 and [ICOS]L0 from FIG. 24; [ICOS]_H0.66 and [ICOS]_L0 from FIG. 24; Jmab-136[ICOS]vh and vl from FIG. 60; ICOS 314.8[ICOS]vh and vl from FIG. 60; H2L5[ICOS] vh and vl from FIG. 60; 37A10S713[ICOS] vh and vl from FIG. 60; C398.4A[ICOS] vh and vl from FIG. 60; ICOS.33[ICOS] vh and vl from FIG. 60; STIM001[ICOS] vh and vl from FIG. 60; and STIM003[ICOS] vh and vl from FIG. 60. and the skew variant pair S364K/E357Q:L368D/K370S with either the IL-15 N4D/N65D variant or the IL-15 D30N/N65D variant or the IL-15 D30N/E64Q/N65D variant.

[0310] In the IL15-Fc x scFv-Fc format, one preferred embodiment utilizes the ICOS ABD having the variable heavy and light domain pair of [ICOS]_H0 and [ICOS]L0 from FIG. 24; [ICOS]_H0.66 and [ICOS]_L0 from FIG. 24; Jmab-136[ICOS]vh and vl from FIG. 60; ICOS 314.8[ICOS]vh and vl from FIG. 60; H2L5[ICOS] vh and vl from FIG. 60; 37A10S713[ICOS] vh and vl from FIG. 60; C398.4A[ICOS] vh and vl from FIG. 60; ICOS.33[ICOS] vh and vl from FIG. 60; STIM001[ICOS] vh and vl from FIG. 60; and STIM003[ICOS] vh and vl from FIG. 60 and the skew variants S364K/E357Q (on a first Fc-containing monomer) and L368D/K370S (on the second corresponding Fc-containing monomer), the pI variants Q295E/N384D/Q418E/N421D (on either the first or the second Fc-containing monomer), the ablation variants E233P/L234V/L235A/G236_/S267K on both Fc-containing monomers, and optionally the 428L/434S variants on both Fc-containing monomers.

[0311] Additional useful human ICOS antigen binding domains for use in this ICOS-targeted x IL-15/IL-15Rα Fc fusion protein format include, but are not limited to, those listed in FIGS. 24, 60, and 62-64 (e.g., SEQ ID NOs:140-143, 179-242, 315-584) and the sequence listing (e.g., SEQ ID NOs:585-802).

[0312] D. ncIL15+IL15Rα-Fc x scFv-Fc

[0313] This embodiment is shown in FIG. 25D, and comprises three monomers. The first monomer comprises, from N- to C-terminus, the IL-15Rα(sushi) domain-domain linker-CH2-CH3, and the second monomer comprises vh-scFv linker-vl-hinge-CH2-CH3 or vl-scFv linker-vh-hinge-CH2-CH3, although in either orientation a domain linker can be substituted for the hinge. The third monomer is the variant IL-15 domain. This is generally referred to as “ncIL15+IL15Rα-Fc x scFv-Fc” or “scFv-Fc x ncIL15+IL15Rα-Fc” with the “nc” standing for “non-covalent” referring to the self-assembling non-covalent attachment of the IL-15 variant and IL-15Rα(sushi) domain.

[0314] In the ncIL15+IL15Rα-Fc x scFv-Fc format, one preferred embodiment utilizes the ICOS ABD having any of the variable heavy and light domain pairs of [ICOS]_H0 and [ICOS]L0 from FIG. 24; [ICOS]_H0.66 and [ICOS]_L0 from FIG. 24; Jmab-136[ICOS]vh and vl from FIG. 60; ICOS 314.8[ICOS]vh and vl from FIG. 60; H2L5[ICOS] vh and vl from FIG. 60; 37A10S713[ICOS] vh and vl from FIG. 60; C398.4A[ICOS] vh and vl from FIG. 60; ICOS.33[ICOS] vh and vl from FIG. 60; STIM001[ICOS] vh and vl from FIG. 60; and STIM003[ICOS] vh and vl from FIG. 60.

[0315] In the ncIL15+IL15Rα-Fc x scFv-Fc format, one preferred embodiment utilizes the ICOS ABD having the variable heavy and light domain pair of [ICOS]_H0 and [ICOS]L0 from FIG. 24; [ICOS]_H0.66 and [ICOS]_L0 from FIG. 24; Jmab-136[ICOS]vh and vl from FIG. 60; ICOS 314.8[ICOS]vh and vl from FIG. 60; H2L5[ICOS] vh and vl from FIG. 60; 37A10S713[ICOS] vh and vl from FIG. 60; C398.4A[ICOS] vh and vl from FIG. 60; ICOS.33[ICOS] vh and vl from FIG. 60; STIM001[ICOS] vh and vl from FIG. 60; and STIM003[ICOS] vh and vl from FIG. 60.

[0316] In the ncIL15+IL15Rα-Fc x scFv-Fc format, one preferred embodiment utilizes the anti-ICOSABD having the variable heavy and light domain pair of [ICOS]_H0 and [ICOS]_L0 from FIG. 24; [ICOS]_H0.66 and [ICOS]_L0 from FIG. 24; Jmab-136[ICOS]vh and vl from FIG. 60; ICOS 314.8[ICOS]vh and vl from FIG. 60; H2L5[ICOS] vh and vl from FIG. 60; 37A10S713[ICOS] vh and vl from FIG. 60; C398.4A[ICOS] vh and vl from FIG. 60; ICOS.33[ICOS] vh and vl from FIG. 60; STIM001[ICOS] vh and vl from FIG. 60; and STIM003[ICOS] vh and vl from FIG. 60.

[0317] In the ncIL15+IL15Rα-Fc x scFv-Fc format, one preferred embodiment utilizes the anti-ICOSABD having the variable heavy and light domain pair of [ICOS]_H0 and [ICOS]_L0 from FIG. 24; [ICOS]_H0.66 and [ICOS]_L0 from FIG. 24; Jmab-136[ICOS]vh and vl from FIG. 60; ICOS 314.8[ICOS]vh and vl from FIG. 60; H2L5[ICOS] vh and vl from FIG. 60; 37A10S713[ICOS] vh and vl from FIG. 60; C398.4A[ICOS] vh and vl from FIG. 60; ICOS.33[ICOS] vh and vl from FIG. 60; STIM001[ICOS] vh and vl from FIG. 60; and STIM003[ICOS] vh and vl from FIG. 60, with either the IL-15 N4D/N65D variant or the IL-15 D30N/N65D variant or the IL-15 D30N/E64Q/N65D variant.

[0318] In the ncIL15+IL15Rα-Fc x scFv-Fc format, one preferred embodiment utilizes the skew variant pair S364K/E357Q:L368D/K370S.

[0319] In the ncIL15+IL15Rα-Fc x scFv-Fc format, one preferred embodiment utilizes the anti-ICOSABD having the variable heavy and light domain pair of [ICOS]_H0 and [ICOS]_L0 from FIG. 24; [ICOS]_H0.66 and [ICOS]_L0 from FIG. 24; Jmab-136[ICOS]vh and vl from FIG. 60; ICOS 314.8[ICOS]vh and vl from FIG. 60; H2L5[ICOS] vh and vl from FIG. 60; 37A10S713[ICOS] vh and vl from FIG. 60; C398.4A[ICOS] vh and vl from FIG. 60; ICOS.33[ICOS] vh and vl from FIG. 60; STIM001[ICOS] vh and vl from FIG. 60; and STIM003[ICOS] vh and vl from FIG. 60 and the skew variant pair S364K/E357Q:L368D/K370S.

[0320] In the ncIL15+IL15Rα-Fc x scFv-Fc format, one preferred embodiment utilizes the ICOS ABD having the variable heavy and light domain pair of [ICOS]_H0 and [ICOS]L0 from FIG. 24; [ICOS]_H0.66 and [ICOS]_L0 from FIG. 24; Jmab-136[ICOS]vh and vl from FIG. 60; ICOS 314.8[ICOS]vh and vl from FIG. 60; H2L5[ICOS] vh and vl from FIG. 60; 37A10S713[ICOS] vh and vl from FIG. 60; C398.4A[ICOS] vh and vl from FIG. 60; ICOS.33[ICOS] vh and vl from FIG. 60; STIM001[ICOS] vh and vl from FIG. 60; and STIM003[ICOS] vh and vl from FIG. 60 and the skew variant pair S364K/E357Q:L368D/K370S with either the IL-15 N4D/N65D variant or the IL-15 D30N/N65D variant or the IL-15 D30N/E64Q/N65D variant.

[0321] In the ncIL15+IL15Rα-Fc x scFv-Fc format, one preferred embodiment utilizes the anti-ICOSABD having the variable heavy and light domain pair of [ICOS]_H0 and [ICOS]_L0 from FIG. 24; [ICOS]_H0.66 and [ICOS]_L0 from FIG. 24; Jmab-136[ICOS]vh and vl from FIG. 60; ICOS 314.8[ICOS]vh and vl from FIG. 60; H2L5[ICOS] vh and vl from FIG. 60; 37A10S713[ICOS] vh and vl from FIG. 60; C398.4A[ICOS] vh and vl from FIG. 60; ICOS.33[ICOS] vh and vl from FIG. 60; STIM001[ICOS] vh and vl from FIG. 60; and STIM003[ICOS] vh and vl from FIG. 60, the skew variants S364K/E357Q (on a first Fc-containing monomer) and L368D/K370S (on the second corresponding Fc-containing monomer), the pI variants Q295E/N384D/Q418E/N421D (on either the first or the second Fc-containing monomer side), the ablation variants E233P/L234V/L235A/G236_/S267K on both Fc-containing monomers, and optionally the 428L/434S variants on both Fc-containing monomers.

[0322] Additional useful human ICOS antigen binding domains for use in this ICOS-targeted x IL-15/IL-15Rα Fc fusion protein format include, but are not limited to, those listed in FIGS. 24, 60, and 62-64 (e.g., SEQ ID NOs:140-143, 179-242, 315-584) and the sequence listing (e.g., SEQ ID NOs:585-802).

[0323] E. ncIL15Rα+IL15-Fc x scFv-Fc

[0324] This embodiment is shown in FIG. 25E, and comprises three monomers. The first monomer comprises, from N- to C-terminus, a variant IL15-domain linker-CH2-CH3, and the second monomer comprises vh-scFv linker-vl-hinge-CH2-CH3 or vl-scFv linker-vh-hinge-CH2-CH3, although in either orientation a domain linker can be substituted for the hinge. The third monomer is the IL-15Rα(sushi) domain. This is generally referred to as “ncIL15Rα+IL15-Fc x scFv-Fc” or “scFv-Fc x ncIL15Rα+IL15-Fc” with the “nc” standing for “non-covalent” referring to the self-assembling non-covalent attachment of the IL-15 variant and IL-15Rα(sushi) domain.

[0325] In the ncIL15Rα+IL15-Fc x scFv-Fc format, one preferred embodiment utilizes the ICOS ABD having any of the variable heavy and light domain pairs of [ICOS]_H0 and [ICOS]L0 from FIG. 24; [ICOS]_H0.66 and [ICOS]_L0 from FIG. 24; Jmab-136[ICOS]vh and vl from FIG. 60; ICOS 314.8[ICOS]vh and vl from FIG. 60; H2L5[ICOS] vh and vl from FIG. 60; 37A10S713[ICOS] vh and vl from FIG. 60; C398.4A[ICOS] vh and vl from FIG. 60; ICOS.33[ICOS] vh and vl from FIG. 60; STIM001[ICOS] vh and vl from FIG. 60; and STIM003[ICOS] vh and vl from FIG. 60.

[0326] In the ncIL15Rα+IL15-Fc x scFv-Fc format, one preferred embodiment utilizes the ICOS ABD having the variable heavy and light domain pair of [ICOS]_H0 and [ICOS]L0 from FIG. 24; [ICOS]_H0.66 and [ICOS]_L0 from FIG. 24; Jmab-136[ICOS]vh and vl from FIG. 60; ICOS 314.8[ICOS]vh and vl from FIG. 60; H2L5[ICOS] vh and vl from FIG. 60; 37A10S713[ICOS] vh and vl from FIG. 60; C398.4A[ICOS] vh and vl from FIG. 60; ICOS.33[ICOS] vh and vl from FIG. 60; STIM001[ICOS] vh and vl from FIG. 60; and STIM003[ICOS] vh and vl from FIG. 60.

[0327] In the ncIL15Rα+IL15-Fc x scFv-Fc format, one preferred embodiment utilizes the anti-ICOSABD having the variable heavy and light domain pair of [ICOS]_H0 and [ICOS]_L0 from FIG. 24; [ICOS]_H0.66 and [ICOS]_L0 from FIG. 24; Jmab-136[ICOS]vh and vl from FIG. 60; ICOS 314.8[ICOS]vh and vl from FIG. 60; H2L5[ICOS] vh and vl from FIG. 60; 37A10S713[ICOS] vh and vl from FIG. 60; C398.4A[ICOS] vh and vl from FIG. 60; ICOS.33[ICOS] vh and vl from FIG. 60; STIM001[ICOS] vh and vl from FIG. 60; and STIM003[ICOS] vh and vl from FIG. 60.

[0328] In the ncIL15Rα+IL15-Fc x scFv-Fc format, one preferred embodiment utilizes the anti-ICOSABD having the variable heavy and light domain pair of [ICOS]_H0 and [ICOS]_L0 from FIG. 24; [ICOS]_H0.66 and [ICOS]_L0 from FIG. 24; Jmab-136[ICOS]vh and vl from FIG. 60; ICOS 314.8[ICOS]vh and vl from FIG. 60; H2L5[ICOS] vh and vl from FIG. 60; 37A10S713[ICOS] vh and vl from FIG. 60; C398.4A[ICOS] vh and vl from FIG. 60; ICOS.33[ICOS] vh and vl from FIG. 60; STIM001[ICOS] vh and vl from FIG. 60; and STIM003[ICOS] vh and vl from FIG. 60, with either the IL-15 N4D/N65D variant or the IL-15 D30N/N65D variant or the IL-15 D30N/E64Q/N65D variant.

[0329] In the ncIL15Rα+IL15-Fc x scFv-Fc format, one preferred embodiment utilizes the skew variant pair S364K/E357Q:L368D/K370S.

[0330] In the ncIL15Rα+IL15-Fc x scFv-Fc format, one preferred embodiment utilizes the anti-ICOSABD having the variable heavy and light domain pair of [ICOS]_H0 and [ICOS]_L0 from FIG. 24; [ICOS]_H0.66 and [ICOS]_L0 from FIG. 24; Jmab-136[ICOS]vh and vl from FIG. 60; ICOS 314.8[ICOS]vh and vl from FIG. 60; H2L5[ICOS] vh and vl from FIG. 60; 37A10S713[ICOS] vh and vl from FIG. 60; C398.4A[ICOS] vh and vl from FIG. 60; ICOS.33[ICOS] vh and vl from FIG. 60; STIM001[ICOS] vh and vl from FIG. 60; and STIM003[ICOS] vh and vl from FIG. 60 and the skew variant pair S364K/E357Q:L368D/K370S.

[0331] In the ncIL15Rα+IL15-Fc x scFv-Fc format, one preferred embodiment utilizes the ICOS ABD having the variable heavy and light domain pair of [ICOS]_H0 and [ICOS]L0 from FIG. 24; [ICOS]_H0.66 and [ICOS]_L0 from FIG. 24; Jmab-136[ICOS]vh and vl from FIG. 60; ICOS 314.8[ICOS]vh and vl from FIG. 60; H2L5[ICOS] vh and vl from FIG. 60; 37A10S713[ICOS] vh and vl from FIG. 60; C398.4A[ICOS] vh and vl from FIG. 60; ICOS.33[ICOS] vh and vl from FIG. 60; STIM001[ICOS] vh and vl from FIG. 60; and STIM003[ICOS] vh and vl from FIG. 60 and the skew variant pair S364K/E357Q:L368D/K370S with either the IL-15 N4D/N65D variant or the IL-15 D30N/N65D variant or the IL-15 D30N/E64Q/N65D variant.

[0332] In the ncIL15Rα+IL15-Fc x scFv-Fc format, one preferred embodiment utilizes the anti-ICOSABD having the variable heavy and light domain pair of [ICOS]_H0 and [ICOS]_L0 from FIG. 24; [ICOS]_H0.66 and [ICOS]_L0 from FIG. 24; Jmab-136[ICOS]vh and vl from FIG. 60; ICOS 314.8[ICOS]vh and vl from FIG. 60; H2L5[ICOS] vh and vl from FIG. 60; 37A10S713[ICOS] vh and vl from FIG. 60; C398.4A[ICOS] vh and vl from FIG. 60; ICOS.33[ICOS] vh and vl from FIG. 60; STIM001[ICOS] vh and vl from FIG. 60; and STIM003[ICOS] vh and vl from FIG. 60, the skew variants S364K/E357Q (on a first Fc-containing monomer) and L368D/K370S (on the second corresponding Fc-containing monomer), the pI variants Q295E/N384D/Q418E/N421D (on either the first or the second Fc-containing monomer), the ablation variants E233P/L234V/L235A/G236_/S267K on both Fc-containing monomers, and optionally the 428L/434S variants on both Fc-containing monomers.

[0333] Additional useful human ICOS antigen binding domains for use in this ICOS-targeted x IL-15/IL-15Rα Fc fusion protein format include, but are not limited to, those listed in FIGS. 24, 60, and 62-64 (e.g., SEQ ID NOs:140-143, 179-242, 315-584) and the sequence listing (e.g., SEQ ID NOs:585-802).

[0334] F. dsIL15+IL15Rα-Fc x scFv-Fc

[0335] This embodiment is shown in FIG. 25F and comprises three monomers. The first monomer comprises, from N- to C-terminus, a variant IL-15Rα(sushi) domain-domain linker-CH2-CH3, wherein the variant IL-15Rα(sushi) domain has an engineered cysteine residue and the second monomer comprises vh-scFv linker-vl-hinge-CH2-CH3 or vl-scFv linker-vh-hinge-CH2-CH3, although in either orientation a domain linker can be substituted for the hinge. The third monomer is the variant IL-15, also engineered to have a cysteine variant amino acid, thus allowing a disulfide bridge to form between the IL-15Rα(sushi) domain and the variant IL-15 domain. This is generally referred to as “dsIL15+IL15Rα-Fc x scFv-Fc” or “scFv-Fc x dsIL15+IL15Rα-Fc”, with the “ds” standing for “disulfide”.

[0336] In the dsIL15+IL15Rα-Fc x scFv-Fc format, one preferred embodiment utilizes the ICOS ABD having any of [ICOS]_H0 and [ICOS]L0 from FIG. 24; [ICOS]_H0.66 and [ICOS]_L0 from FIG. 24; Jmab-136[ICOS]vh and vl from FIG. 60; ICOS 314.8[ICOS]vh and vl from FIG. 60; H2L5[ICOS] vh and vl from FIG. 60; 37A10S713[ICOS] vh and vl from FIG. 60; C398.4A[ICOS] vh and vl from FIG. 60; ICOS.33[ICOS] vh and vl from FIG. 60; STIM001[ICOS] vh and vl from FIG. 60; and STIM003[ICOS] vh and vl from FIG. 60.

[0337] In the dsIL15+IL15Rα-Fc x scFv-Fc format, one preferred embodiment utilizes the ICOS ABD having the variable heavy and light domain pair described herein with either the IL-15 N4D/N65D variant or the IL-15 D30N/N65D variant or the IL-15 D30N/E64Q/N65D variant, as well as appropriate cysteine substitutions.

[0338] In the dsIL15+IL15Rα-Fc x scFv-Fc format, one preferred embodiment utilizes the skew variant pair S364K/E357Q:L368D/K370S.

[0339] In the dsIL15+IL15Rα-Fc x scFv-Fc format, one preferred embodiment utilizes the ICOS ABD having the variable heavy and light domain pair of [ICOS]_H0 and [ICOS]L0 from FIG. 24; [ICOS]_H0.66 and [ICOS]_L0 from FIG. 24; Jmab-136[ICOS]vh and vl from FIG. 60; ICOS 314.8[ICOS]vh and vl from FIG. 60; H2L5[ICOS] vh and vl from FIG. 60; 37A10S713[ICOS] vh and vl from FIG. 60; C398.4A[ICOS] vh and vl from FIG. 60; ICOS.33[ICOS] vh and vl from FIG. 60; STIM001[ICOS] vh and vl from FIG. 60; and STIM003[ICOS] vh and vl from FIG. 60 and the skew variant pair S364K/E357Q:L368D/K370S.

[0340] In the dsIL15+IL15Rα-Fc x scFv-Fc format, one preferred embodiment utilizes the ICOS ABD having the variable heavy and light domain pair of [ICOS]_H0 and [ICOS]L0 from FIG. 24; [ICOS]_H0.66 and [ICOS]_L0 from FIG. 24; Jmab-136[ICOS]vh and vl from FIG. 60; ICOS 314.8[ICOS]vh and vl from FIG. 60; H2L5[ICOS] vh and vl from FIG. 60; 37A10S713[ICOS] vh and vl from FIG. 60; C398.4A[ICOS] vh and vl from FIG. 60; ICOS.33[ICOS] vh and vl from FIG. 60; STIM001[ICOS] vh and vl from FIG. 60; and STIM003[ICOS] vh and vl from FIG. 60 with either the IL-15 N4D/N65D variant or the IL-15 D30N/N65D variant or the IL-15 D30N/E64Q/N65D variant with the appropriate cysteine substitutions.

[0341] In the dsIL15+IL15Rα-Fc x scFv-Fc format, one preferred embodiment utilizes the ICOS ABD having the variable heavy and light domain pair of [ICOS]_H0 and [ICOS]L0 from FIG. 24; [ICOS]_H0.66 and [ICOS]_L0 from FIG. 24; Jmab-136[ICOS]vh and vl from FIG. 60; ICOS 314.8[ICOS]vh and vl from FIG. 60; H2L5[ICOS] vh and vl from FIG. 60; 37A10S713[ICOS] vh and vl from FIG. 60; C398.4A[ICOS] vh and vl from FIG. 60; ICOS.33[ICOS] vh and vl from FIG. 60; STIM001[ICOS] vh and vl from FIG. 60; and STIM003[ICOS] vh and vl from FIG. 60, the skew variants S364K/E357Q (on a first Fc-containing monomer) and L368D/K370S (on the second corresponding Fc-containing monomer), the pI variants Q295E/N384D/Q418E/N421D (on either the first or the second Fc-containing monomer), the ablation variants E233P/L234V/L235A/G236_/S267K on both monomers, and optionally the 428L/434S variants on both sides.

[0342] Additional useful human ICOS antigen binding domains for use in this ICOS-targeted x IL-15/IL-15Rα Fc fusion protein format include, but are not limited to, those listed in FIGS. 24, 60, and 62-64 (e.g., SEQ ID NOs:140-143, 179-242, 315-584) and the sequence listing (e.g., SEQ ID NOs:585-802).

[0343] G. dsIL15Rα+IL15-Fc x scFv-Fc

[0344] This embodiment is shown in FIG. 25G and comprises three monomers. The first monomer comprises, from N- to C-terminus, a variant IL-15-domain linker-CH2-CH3, wherein the variant IL-15 has an engineered cysteine residue and the second monomer comprises vh-scFv linker-vl-hinge-CH2-CH3 or vl-scFv linker-vh-hinge-CH2-CH3, although in either orientation a domain linker can be substituted for the hinge. The third monomer is a variant IL-15Rα(sushi) domain, also engineered to have a cysteine variant amino acid, thus allowing a disulfide bridge to form between the IL-15Rα(sushi) domain and the variant IL-15. This is generally referred to as “dsIL15Rα+IL15-Fc x scFv-Fc” or “scFv-Fc x dsIL15Rα+IL15-Fc”, with the “ds” standing for “disulfide”.

[0345] In the dsIL15Rα+IL15-Fc x scFv-Fc format, one preferred embodiment utilizes the ICOS ABD having any of [ICOS]_H0 and [ICOS]L0 from FIG. 24; [ICOS]_H0.66 and [ICOS]_L0 from FIG. 24; Jmab-136[ICOS]vh and vl from FIG. 60; ICOS 314.8[ICOS]vh and vl from FIG. 60; H2L5[ICOS] vh and vl from FIG. 60; 37A10S713[ICOS] vh and vl from FIG. 60; C398.4A[ICOS] vh and vl from FIG. 60; ICOS.33[ICOS] vh and vl from FIG. 60; STIM001[ICOS] vh and vl from FIG. 60; and STIM003[ICOS] vh and vl from FIG. 60.

[0346] In the dsIL15Rα+IL15-Fc x scFv-Fc format, one preferred embodiment utilizes the ICOS ABD having the variable heavy and light domain pair described herein with either the IL-15 N4D/N65D variant or the IL-15 D30N/N65D variant or the IL-15 D30N/E64Q/N65D variant, as well as appropriate cysteine substitutions.

[0347] In the dsIL15Rα+IL15-Fc x scFv-Fc format, one preferred embodiment utilizes the skew variant pair S364K/E357Q:L368D/K370S.

[0348] In the dsIL15Rα+IL15-Fc x scFv-Fc format, one preferred embodiment utilizes the ICOS ABD having the variable heavy and light domain pair of [ICOS]_H0 and [ICOS]L0 from FIG. 24; [ICOS]_H0.66 and [ICOS]_L0 from FIG. 24; Jmab-136[ICOS]vh and vl from FIG. 60; ICOS 314.8[ICOS]vh and vl from FIG. 60; H2L5[ICOS] vh and vl from FIG. 60; 37A10S713[ICOS] vh and vl from FIG. 60; C398.4A[ICOS] vh and vl from FIG. 60; ICOS.33[ICOS] vh and vl from FIG. 60; STIM001[ICOS] vh and vl from FIG. 60; and STIM003[ICOS] vh and vl from FIG. 60 and the skew variant pair S364K/E357Q:L368D/K370S.

[0349] In the dsIL15Rα+IL15-Fc x scFv-Fc format, one preferred embodiment utilizes the ICOS ABD having the variable heavy and light domain pair of [ICOS]_H0 and [ICOS]L0 from FIG. 24; [ICOS]_H0.66 and [ICOS]_L0 from FIG. 24; Jmab-136[ICOS]vh and vl from FIG. 60; ICOS 314.8[ICOS]vh and vl from FIG. 60; H2L5[ICOS] vh and vl from FIG. 60; 37A10S713[ICOS] vh and vl from FIG. 60; C398.4A[ICOS] vh and vl from FIG. 60; ICOS.33[ICOS] vh and vl from FIG. 60; STIM001[ICOS] vh and vl from FIG. 60; and STIM003[ICOS] vh and vl from FIG. 60 with either the IL-15 N4D/N65D variant or the IL-15 D30N/N65D variant or the IL-15 D30N/E64Q/N65D variant with the appropriate cysteine substitutions.

[0350] In the dsIL15Rα+IL15-Fc x scFv-Fc format, one preferred embodiment utilizes the ICOS ABD having the variable heavy and light domain pair of [ICOS]_H0 and [ICOS]L0 from FIG. 24; [ICOS]_H0.66 and [ICOS]_L0 from FIG. 24; Jmab-136[ICOS]vh and vl from FIG. 60; ICOS 314.8[ICOS]vh and vl from FIG. 60; H2L5[ICOS] vh and vl from FIG. 60; 37A10S713[ICOS] vh and vl from FIG. 60; C398.4A[ICOS] vh and vl from FIG. 60; ICOS.33[ICOS] vh and vl from FIG. 60; STIM001[ICOS] vh and vl from FIG. 60; and STIM003[ICOS] vh and vl from FIG. 60, the skew variants S364K/E357Q (on a first Fc-containing monomer) and L368D/K370S (on the second corresponding Fc-containing monomer), the pI variants Q295E/N384D/Q418E/N421D (on either the first or the second Fc-containing monomer), the ablation variants E233P/L234V/L235A/G236_/S267K on both Fc-containing monomers, and optionally the 428L/434S variants on both Fc-containing monomers.

[0351] Additional useful human ICOS antigen binding domains for use in this ICOS-targeted x IL-15/IL-15Rα Fc fusion protein format include, but are not limited to, those listed in FIGS. 24, 60, and 62-64 (e.g., SEQ ID NOs:140-143, 179-242, 315-584) and the sequence listing (e.g., SEQ ID NOs:585-802).

[0352] H. scIL15Rα-IL15-Fc x Fab-Fc

[0353] This embodiment is shown in FIG. 25H, and comprises three monomers. The first monomer comprises, from N- to C-terminus, the IL-15Rα(sushi) domain-domain linker-variant IL-15-domain linker-CH2-CH3 and the second monomer comprises a heavy chain, VH-CH1-hinge-CH2-CH3. The third monomer is a light chain, VL-CL. This is generally referred to as “scIL15Rα-IL15-Fc x Fab-Fc”, with the “sc” standing for “single chain”.

[0354] The “scIL15Rα-IL15-Fc x Fab-Fc” format (FIG. 25C) comprises IL-15Rα(sushi) fused to IL-15 by a variable length linker (termed “scIL-15/Rα”) which is then fused to the N-terminus of a heterodimeric Fc-region, with a variable heavy chain (VH) fused to the other side of the heterodimeric Fc, while a corresponding light chain is transfected separately so as to form a Fab with the VH. Preferred combinations of variants for this embodiment are found in FIG. 61A-FIG. 61P.

[0355] In the scIL15Rα-IL15-Fc x Fab-Fc format, one preferred embodiment utilizes the ICOS ABD having the variable heavy and light domain pair of [ICOS]_H0 and [ICOS]L0 from FIG. 24; [ICOS]_H0.66 and [ICOS]_L0 from FIG. 24; Jmab-136[ICOS]vh and vl from FIG. 60; ICOS 314.8[ICOS]vh and vl from FIG. 60; H2L5[ICOS] vh and vl from FIG. 60; 37A10S713[ICOS] vh and vl from FIG. 60; C398.4A[ICOS] vh and vl from FIG. 60; ICOS.33[ICOS] vh and vl from FIG. 60; STIM001[ICOS] vh and vl from FIG. 60; or STIM003[ICOS] vh and vl from FIG. 60.

[0356] In the scIL15Rα-IL15-Fc x Fab-Fc format, one preferred embodiment utilizes the ICOS ABD having the variable heavy and light domain pair of [ICOS]_H0 and [ICOS]L0 from FIG. 24; [ICOS]_H0.66 and [ICOS]_L0 from FIG. 24; Jmab-136[ICOS]vh and vl from FIG. 60; ICOS 314.8[ICOS]vh and vl from FIG. 60; H2L5[ICOS] vh and vl from FIG. 60; 37A10S713[ICOS] vh and vl from FIG. 60; C398.4A[ICOS] vh and vl from FIG. 60; ICOS.33[ICOS] vh and vl from FIG. 60; STIM001[ICOS] vh and vl from FIG. 60; or STIM003[ICOS] vh and vl from FIG. 60, with either the IL-15 N4D/N65D variant or the IL-15 D30N/N65D variant or the IL-15 D30N/E64Q/N65D variant.

[0357] In the scIL15Rα-IL15-Fc x Fab-Fc format, one preferred embodiment utilizes the skew variant pair S364K/E357Q:L368D/K370S.

[0358] In the scIL15Rα-IL15-Fc x Fab-Fc format, one preferred embodiment utilizes the ICOS ABD having the variable heavy and light domain pair of [ICOS]_H0 and [ICOS]L0 from FIG. 24; [ICOS]_H0.66 and [ICOS]_L0 from FIG. 24; Jmab-136[ICOS]vh and vl from FIG. 60; ICOS 314.8[ICOS]vh and vl from FIG. 60; H2L5[ICOS] vh and vl from FIG. 60; 37A10S713[ICOS] vh and vl from FIG. 60; C398.4A[ICOS] vh and vl from FIG. 60; ICOS.33[ICOS] vh and vl from FIG. 60; STIM001[ICOS] vh and vl from FIG. 60; or STIM003[ICOS] vh and vl from FIG. 60 and the skew variant pair S364K/E357Q:L368D/K370S.

[0359] In the scIL15Rα-IL15-Fc x Fab-Fc format, one preferred embodiment utilizes the ICOS ABD having the variable heavy and light domain pair of [ICOS]_H0 and [ICOS]L0 from FIG. 24; [ICOS]_H0.66 and [ICOS]_L0 from FIG. 24; Jmab-136[ICOS]vh and vl from FIG. 60; ICOS 314.8[ICOS]vh and vl from FIG. 60; H2L5[ICOS] vh and vl from FIG. 60; 37A10S713[ICOS] vh and vl from FIG. 60; C398.4A[ICOS] vh and vl from FIG. 60; ICOS.33[ICOS] vh and vl from FIG. 60; STIM001[ICOS] vh and vl from FIG. 60; and STIM003[ICOS] vh and vl from FIG. 60 and the skew variant pair S364K/E357Q:L368D/K370S with either the IL-15 N4D/N65D variant or the IL-15 D30N/N65D variant or the IL-15 D30N/E64Q/N65D variant.

[0360] In the scIL15Rα-IL15-Fc x Fab-Fc format, one preferred embodiment utilizes the ICOS ABD having the variable heavy and light domain of [ICOS]_H0 and [ICOS]L0 from FIG. 24; [ICOS]_H0.66 and [ICOS]_L0 from FIG. 24; Jmab-136[ICOS]vh and vl from FIG. 60; ICOS 314.8[ICOS]vh and vl from FIG. 60; H2L5[ICOS] vh and vl from FIG. 60; 37A10S713[ICOS] vh and vl from FIG. 60; C398.4A[ICOS] vh and vl from FIG. 60; ICOS.33[ICOS] vh and vl from FIG. 60; STIM001[ICOS] vh and vl from FIG. 60; or STIM003[ICOS] vh and vl from FIG. 60, the skew variants S364K/E357Q (on a first Fc-containing monomer) and L368D/K370S (on the second corresponding Fc-containing monomer), the pI variants Q295E/N384D/Q418E/N421D (on either the first or the second Fc-containing monomer; and further comprising N208D if said Fc-containing monomer comprises CH1), the ablation variants E233P/L234V/L235A/G236_/S267K on both Fc-containing monomers, and optionally the 428L/434S variants on both Fc-containing monomers.

[0361] Additional useful human ICOS antigen binding domains for use in this ICOS-targeted x IL-15/IL-15Rα Fc fusion protein format include, but are not limited to, those listed in FIGS. 24, 60, and 62-64 (e.g., SEQ ID NOs:140-143, 179-242, 315-584) and the sequence listing (e.g., SEQ ID NOs:585-802).

[0362] I. scIL15-IL15Rα-Fc x Fab-Fc

[0363] This embodiment is shown in FIG. 25I, and comprises three monomers. The first monomer comprises, from N- to C-terminus, a variant IL-15-domain linker-IL-15Rα(sushi) domain-domain linker-CH2-CH3 and the second monomer comprises a heavy chain, VH-CH1-hinge-CH2-CH3. The third monomer is a light chain, VL-CL. This is generally referred to as “scIL15-IL15Rα-Fc x Fab-Fc”, with the “sc” standing for “single chain”.

[0364] In the scIL15-IL15Rα-Fc x Fab-Fc format, one preferred embodiment utilizes the ICOS ABD having the variable heavy and light domain pair of [ICOS]_H0 and [ICOS]L0 from FIG. 24; [ICOS]_H0.66 and [ICOS]_L0 from FIG. 24; Jmab-136[ICOS]vh and vl from FIG. 60; ICOS 314.8[ICOS]vh and vl from FIG. 60; H2L5[ICOS] vh and vl from FIG. 60; 37A10S713[ICOS] vh and vl from FIG. 60; C398.4A[ICOS] vh and vl from FIG. 60; ICOS.33[ICOS] vh and vl from FIG. 60; STIM001[ICOS] vh and vl from FIG. 60; or STIM003[ICOS] vh and vl from FIG. 60.

[0365] In the scIL15-IL15Rα-Fc x Fab-Fc format, one preferred embodiment utilizes the ICOS ABD having the variable heavy and light domain pair of [ICOS]_H0 and [ICOS]L0 from FIG. 24; [ICOS]_H0.66 and [ICOS]_L0 from FIG. 24; Jmab-136[ICOS]vh and vl from FIG. 60; ICOS 314.8[ICOS]vh and vl from FIG. 60; H2L5[ICOS] vh and vl from FIG. 60; 37A10S713[ICOS] vh and vl from FIG. 60; C398.4A[ICOS] vh and vl from FIG. 60; ICOS.33[ICOS] vh and vl from FIG. 60; STIM001[ICOS] vh and vl from FIG. 60; or STIM003[ICOS] vh and vl from FIG. 60, with either the IL-15 N4D/N65D variant or the IL-15 D30N/N65D variant or the IL-15 D30N/E64Q/N65D variant.

[0366] In the scIL15-IL15Rα-Fc x Fab-Fc format, one preferred embodiment utilizes the skew variant pair S364K/E357Q:L368D/K370S.

[0367] In the scIL15-IL15Rα-Fc x Fab-Fc format, one preferred embodiment utilizes the ICOS ABD having the variable heavy and light domain pair of [ICOS]_H0 and [ICOS]L0 from FIG. 24; [ICOS]_H0.66 and [ICOS]_L0 from FIG. 24; Jmab-136[ICOS]vh and vl from FIG. 60; ICOS 314.8[ICOS]vh and vl from FIG. 60; H2L5[ICOS] vh and vl from FIG. 60; 37A10S713[ICOS] vh and vl from FIG. 60; C398.4A[ICOS] vh and vl from FIG. 60; ICOS.33[ICOS] vh and vl from FIG. 60; STIM001[ICOS] vh and vl from FIG. 60; or STIM003[ICOS] vh and vl from FIG. 60 and the skew variant pair S364K/E357Q:L368D/K370S.

[0368] In the scIL15-IL15Rα-Fc x Fab-Fc format, one preferred embodiment utilizes the ICOS ABD having the variable heavy and light domain pair of [ICOS]_H0 and [ICOS]L0 from FIG. 24; [ICOS]_H0.66 and [ICOS]_L0 from FIG. 24; Jmab-136[ICOS]vh and vl from FIG. 60; ICOS 314.8[ICOS]vh and vl from FIG. 60; H2L5[ICOS] vh and vl from FIG. 60; 37A10S713[ICOS] vh and vl from FIG. 60; C398.4A[ICOS] vh and vl from FIG. 60; ICOS.33[ICOS] vh and vl from FIG. 60; STIM001[ICOS] vh and vl from FIG. 60; and STIM003[ICOS] vh and vl from FIG. 60 and the skew variant pair S364K/E357Q:L368D/K370S with either the IL-15 N4D/N65D variant or the IL-15 D30N/N65D variant or the IL-15 D30N/E64Q/N65D variant.

[0369] In the scIL15-IL15Rα-Fc x Fab-Fc format, one preferred embodiment utilizes the ICOS ABD having the variable heavy and light domain of [ICOS]_H0 and [ICOS]L0 from FIG. 24; [ICOS]_H0.66 and [ICOS]_L0 from FIG. 24; Jmab-136[ICOS]vh and vl from FIG. 60; ICOS 314.8[ICOS]vh and vl from FIG. 60; H2L5[ICOS] vh and vl from FIG. 60; 37A10S713[ICOS] vh and vl from FIG. 60; C398.4A[ICOS] vh and vl from FIG. 60; ICOS.33[ICOS] vh and vl from FIG. 60; STIM001[ICOS] vh and vl from FIG. 60; or STIM003[ICOS] vh and vl from FIG. 60, the skew variants S364K/E357Q (on a first Fc-containing monomer) and L368D/K370S (on the second corresponding Fc-containing monomer), the pI variants Q295E/N384D/Q418E/N421D (on either the first or the second Fc-containing monomer; and further comprising N208D if said Fc-containing monomer comprises CH1), the ablation variants E233P/L234V/L235A/G236_/S267K on both Fc-containing monomers, and optionally the 428L/434S variants on both Fc-containing monomers.

[0370] Additional useful human ICOS antigen binding domains for use in this ICOS-targeted x IL-15/IL-15Rα Fc fusion protein format include, but are not limited to, those listed in FIGS. 24, 60, and 62-64 (e.g., SEQ ID NOs:140-143, 179-242, 315-584) and the sequence listing (e.g., SEQ ID NOs:585-802).

[0371] J. IL15-Fc x Fab-Fc

[0372] This embodiment is shown in FIG. 25J, and comprises three monomers. The first monomer comprises, from N- to C-terminus, a variant IL-15-domain linker-CH2-CH3 and the second monomer comprises a heavy chain, VH-CH1-hinge-CH2-CH3. The third monomer is a light chain, VL-CL. This is generally referred to as “IL15-Fc x Fab-Fc”.

[0373] In the IL15-Fc x Fab-Fc format, one preferred embodiment utilizes the ICOS ABD having the variable heavy and light domain pair of [ICOS]_H0 and [ICOS]L0 from FIG. 24; [ICOS]_H0.66 and [ICOS]_L0 from FIG. 24; Jmab-136[ICOS]vh and vl from FIG. 60; ICOS 314.8[ICOS]vh and vl from FIG. 60; H2L5[ICOS] vh and vl from FIG. 60; 37A10S713[ICOS] vh and vl from FIG. 60; C398.4A[ICOS] vh and vl from FIG. 60; ICOS.33[ICOS] vh and vl from FIG. 60; STIM001[ICOS] vh and vl from FIG. 60; or STIM003[ICOS] vh and vl from FIG. 60.

[0374] In the IL15-Fc x Fab-Fc format, one preferred embodiment utilizes the ICOS ABD having the variable heavy and light domain pair of [ICOS]_H0 and [ICOS]L0 from FIG. 24; [ICOS]_H0.66 and [ICOS]_L0 from FIG. 24; Jmab-136[ICOS]vh and vl from FIG. 60; ICOS 314.8[ICOS]vh and vl from FIG. 60; H2L5[ICOS] vh and vl from FIG. 60; 37A10S713[ICOS] vh and vl from FIG. 60; C398.4A[ICOS] vh and vl from FIG. 60; ICOS.33[ICOS] vh and vl from FIG. 60; STIM001[ICOS] vh and vl from FIG. 60; or STIM003[ICOS] vh and vl from FIG. 60, with either the IL-15 N4D/N65D variant or the IL-15 D30N/N65D variant or the IL-15 D30N/E64Q/N65D variant.

[0375] In the IL15-Fc x Fab-Fc format, one preferred embodiment utilizes the skew variant pair S364K/E357Q:L368D/K370S.

[0376] In the IL15-Fc x Fab-Fc format, one preferred embodiment utilizes the ICOS ABD having the variable heavy and light domain pair of [ICOS]_H0 and [ICOS]L0 from FIG. 24; [ICOS]_H0.66 and [ICOS]_L0 from FIG. 24; Jmab-136[ICOS]vh and vl from FIG. 60; ICOS 314.8[ICOS]vh and vl from FIG. 60; H2L5[ICOS] vh and vl from FIG. 60; 37A10S713[ICOS] vh and vl from FIG. 60; C398.4A[ICOS] vh and vl from FIG. 60; ICOS.33[ICOS] vh and vl from FIG. 60; STIM001[ICOS] vh and vl from FIG. 60; or STIM003[ICOS] vh and vl from FIG. 60 and the skew variant pair S364K/E357Q:L368D/K370S.

[0377] In the IL15-Fc x Fab-Fc format, one preferred embodiment utilizes the ICOS ABD having the variable heavy and light domain pair of [ICOS]_H0 and [ICOS]L0 from FIG. 24; [ICOS]_H0.66 and [ICOS]_L0 from FIG. 24; Jmab-136[ICOS]vh and vl from FIG. 60; ICOS 314.8[ICOS]vh and vl from FIG. 60; H2L5[ICOS] vh and vl from FIG. 60; 37A10S713[ICOS] vh and vl from FIG. 60; C398.4A[ICOS] vh and vl from FIG. 60; ICOS.33[ICOS] vh and vl from FIG. 60; STIM001[ICOS] vh and vl from FIG. 60; and STIM003[ICOS] vh and vl from FIG. 60 and the skew variant pair S364K/E357Q:L368D/K370S with either the IL-15 N4D/N65D variant or the IL-15 D30N/N65D variant or the IL-15 D30N/E64Q/N65D variant.

[0378] In the IL15-Fc x Fab-Fc format, one preferred embodiment utilizes the ICOS ABD having the variable heavy and light domain of [ICOS]_H0 and [ICOS]L0 from FIG. 24; [ICOS]_H0.66 and [ICOS]_L0 from FIG. 24; Jmab-136[ICOS]vh and vl from FIG. 60; ICOS 314.8[ICOS]vh and vl from FIG. 60; H2L5[ICOS] vh and vl from FIG. 60; 37A10S713[ICOS] vh and vl from FIG. 60; C398.4A[ICOS] vh and vl from FIG. 60; ICOS.33[ICOS] vh and vl from FIG. 60; STIM001[ICOS] vh and vl from FIG. 60; or STIM003[ICOS] vh and vl from FIG. 60, the skew variants S364K/E357Q (on a first Fc-containing monomer) and L368D/K370S (on the second corresponding Fc-containing monomer), the pI variants Q295E/N384D/Q418E/N421D (on either the first or the second Fc-containing monomer; and further comprising N208D if said Fc-containing monomer comprises CH1), the ablation variants E233P/L234V/L235A/G236_/S267K on both Fc-containing monomers, and optionally the 428L/434S variants on both Fc-containing monomers.

[0379] Additional useful human ICOS antigen binding domains for use in this ICOS-targeted x IL-15/IL-15Rα Fc fusion protein format include, but are not limited to, those listed in FIGS. 24, 60, and 62-64 (e.g., SEQ ID NOs:140-143, 179-242, 315-584) and the sequence listing (e.g., SEQ ID NOs:585-802).

[0380] K. ncIL15+IL15Rα-Fc x Fab-Fc

[0381] This embodiment is shown in FIG. 25K, and comprises three monomers. The first monomer comprises, from N- to C-terminus, the IL-15Rα(sushi) domain-domain linker-CH2-CH3, and the second monomer comprises a heavy chain, VH-CH1-hinge-CH2-CH3. The third monomer is the variant IL-15 domain. This is generally referred to as “ncIL15+IL15Rα-Fc x Fab-Fc”, with the “nc” standing for “non-covalent” referring to the self-assembling non-covalent attachment of the IL-15 variant and IL-15Rα(sushi)domain. ICOS-targeted IL-15/Rα-Fc fusion proteins of this format are depicted in the Figures.

[0382] In the ncIL15+IL15Rα-Fc x Fab-Fc format, one preferred embodiment utilizes the ICOS ABD having the variable heavy and light domain pair of [ICOS]_H0 and [ICOS]L0 from FIG. 24; [ICOS]_H0.66 and [ICOS]_L0 from FIG. 24; Jmab-136[ICOS]vh and vl from FIG. 60; ICOS 314.8[ICOS]vh and vl from FIG. 60; H2L5[ICOS] vh and vl from FIG. 60; 37A10S713[ICOS] vh and vl from FIG. 60; C398.4A[ICOS] vh and vl from FIG. 60; ICOS.33[ICOS] vh and vl from FIG. 60; STIM001[ICOS] vh and vl from FIG. 60; or STIM003[ICOS] vh and vl from FIG. 60.

[0383] In the ncIL15+IL15Rα-Fc x Fab-Fc format, one preferred embodiment utilizes the ICOS ABD having the variable heavy and light domain pair of [ICOS]_H0 and [ICOS]L0 from FIG. 24; [ICOS]_H0.66 and [ICOS]_L0 from FIG. 24; Jmab-136[ICOS]vh and vl from FIG. 60; ICOS 314.8[ICOS]vh and vl from FIG. 60; H2L5[ICOS] vh and vl from FIG. 60; 37A10S713[ICOS] vh and vl from FIG. 60; C398.4A[ICOS] vh and vl from FIG. 60; ICOS.33[ICOS] vh and vl from FIG. 60; STIM001[ICOS] vh and vl from FIG. 60; or STIM003[ICOS] vh and vl from FIG. 60, with either the IL-15 N4D/N65D variant or the IL-15 D30N/N65D variant or the IL-15 D30N/E64Q/N65D variant.

[0384] In the ncIL15+IL15Rα-Fc x Fab-Fc format, one preferred embodiment utilizes the skew variant pair S364K/E357Q:L368D/K370S.

[0385] In the ncIL15+IL15Rα-Fc x Fab-Fc format, one preferred embodiment utilizes the ICOS ABD having the variable heavy and light domain pair of [ICOS]_H0 and [ICOS]L0 from FIG. 24; [ICOS]_H0.66 and [ICOS]_L0 from FIG. 24; Jmab-136[ICOS]vh and vl from FIG. 60; ICOS 314.8[ICOS]vh and vl from FIG. 60; H2L5[ICOS] vh and vl from FIG. 60; 37A10S713[ICOS] vh and vl from FIG. 60; C398.4A[ICOS] vh and vl from FIG. 60; ICOS.33[ICOS] vh and vl from FIG. 60; STIM001[ICOS] vh and vl from FIG. 60; or STIM003[ICOS] vh and vl from FIG. 60 and the skew variant pair S364K/E357Q:L368D/K370S.

[0386] In the ncIL15+IL15Rα-Fc x Fab-Fc format, one preferred embodiment utilizes the ICOS ABD having the variable heavy and light domain pair of [ICOS]_H0 and [ICOS]L0 from FIG. 24; [ICOS]_H0.66 and [ICOS]_L0 from FIG. 24; Jmab-136[ICOS]vh and vl from FIG. 60; ICOS 314.8[ICOS]vh and vl from FIG. 60; H2L5[ICOS] vh and vl from FIG. 60; 37A10S713[ICOS] vh and vl from FIG. 60; C398.4A[ICOS] vh and vl from FIG. 60; ICOS.33[ICOS] vh and vl from FIG. 60; STIM001[ICOS] vh and vl from FIG. 60; or STIM003[ICOS] vh and vl from FIG. 60 with either the IL-15 N4D/N65D variant or the IL-15 D30N/N65D variant or the IL-15 D30N/E64Q/N65D variant.

[0387] In the ncIL15+IL15Rα-Fc x Fab-Fc format, one preferred embodiment utilizes the ICOS ABD having the variable heavy and light domain pair of [ICOS]_H0 and [ICOS]L0 from FIG. 24; [ICOS]_H0.66 and [ICOS]_L0 from FIG. 24; Jmab-136[ICOS]vh and vl from FIG. 60; ICOS 314.8[ICOS]vh and vl from FIG. 60; H2L5[ICOS] vh and vl from FIG. 60; 37A10S713[ICOS] vh and vl from FIG. 60; C398.4A[ICOS] vh and vl from FIG. 60; ICOS.33[ICOS] vh and vl from FIG. 60; STIM001[ICOS] vh and vl from FIG. 60; or STIM003[ICOS] vh and vl from FIG. 60, the skew variants S364K/E357Q (on the a first Fc-containing monomer) and L368D/K370S (on the second corresponding Fc-containing monomer), the pI variants Q295E/N384D/Q418E/N421D (on either the first or the second Fc-containing monomer; and further comprising N208D if said Fc-containing monomer comprises CH1), the ablation variants E233P/L234V/L235A/G236_/S267K on both Fc-containing monomers, and optionally the 428L/434S variants on both Fc-containing monomers.

[0388] Additional useful human ICOS antigen binding domains for use in this ICOS-targeted x IL-15/IL-15Rα Fc fusion protein format include, but are not limited to, those listed in FIGS. 24, 60, and 62-64 (e.g., SEQ ID NOs:140-143, 179-242, 315-584) and the sequence listing (e.g., SEQ ID NOs:585-802).

[0389] L. ncIL15Rα+IL15-Fc x Fab-Fc

[0390] This embodiment is shown in FIG. 25L, and comprises three monomers. The first monomer comprises, from N- to C-terminus, the variant IL-15-domain linker-CH2-CH3, and the second monomer comprises a heavy chain, VH-CH1-hinge-CH2-CH3. The third monomer is the IL-15Rα(sushi) domain. This is generally referred to as “ncIL15Rα+IL15-Fc x Fab-Fc”, with the “nc” standing for “non-covalent” referring to the self-assembling non-covalent attachment of the IL-15 variant and IL-15Rα(sushi)domain. ICOS-targeted IL-15/Rα-Fc fusion proteins of this format are depicted in the Figures.

[0391] In the ncIL15Rα+IL15-Fc x Fab-Fc format, one preferred embodiment utilizes the ICOS ABD having the variable heavy and light domain pair of [ICOS]_H0 and [ICOS]L0 from FIG. 24; [ICOS]_H0.66 and [ICOS]_L0 from FIG. 24; Jmab-136[ICOS]vh and vl from FIG. 60; ICOS 314.8[ICOS]vh and vl from FIG. 60; H2L5[ICOS] vh and vl from FIG. 60; 37A10S713[ICOS] vh and vl from FIG. 60; C398.4A[ICOS] vh and vl from FIG. 60; ICOS.33[ICOS] vh and vl from FIG. 60; STIM001[ICOS] vh and vl from FIG. 60; or STIM003[ICOS] vh and vl from FIG. 60.

[0392] In the ncIL15Rα+IL15-Fc x Fab-Fc format, one preferred embodiment utilizes the ICOS ABD having the variable heavy and light domain pair of [ICOS]_H0 and [ICOS]L0 from FIG. 24; [ICOS]_H0.66 and [ICOS]_L0 from FIG. 24; Jmab-136[ICOS]vh and vl from FIG. 60; ICOS 314.8[ICOS]vh and vl from FIG. 60; H2L5[ICOS] vh and vl from FIG. 60; 37A10S713[ICOS] vh and vl from FIG. 60; C398.4A[ICOS] vh and vl from FIG. 60; ICOS.33[ICOS] vh and vl from FIG. 60; STIM001[ICOS] vh and vl from FIG. 60; or STIM003[ICOS] vh and vl from FIG. 60, with either the IL-15 N4D/N65D variant or the IL-15 D30N/N65D variant or the IL-15 D30N/E64Q/N65D variant.

[0393] In the ncIL15Rα+IL15-Fc x Fab-Fc format, one preferred embodiment utilizes the skew variant pair S364K/E357Q:L368D/K370S.

[0394] In the ncIL15Rα+IL15-Fc x Fab-Fc format, one preferred embodiment utilizes the ICOS ABD having the variable heavy and light domain pair of [ICOS]_H0 and [ICOS]L0 from FIG. 24; [ICOS]_H0.66 and [ICOS]_L0 from FIG. 24; Jmab-136[ICOS]vh and vl from FIG. 60; ICOS 314.8[ICOS]vh and vl from FIG. 60; H2L5[ICOS] vh and vl from FIG. 60; 37A10S713[ICOS] vh and vl from FIG. 60; C398.4A[ICOS] vh and vl from FIG. 60; ICOS.33[ICOS] vh and vl from FIG. 60; STIM001[ICOS] vh and vl from FIG. 60; or STIM003[ICOS] vh and vl from FIG. 60 and the skew variant pair S364K/E357Q:L368D/K370S.

[0395] In the ncIL15Rα+IL15-Fc x Fab-Fc format, one preferred embodiment utilizes the ICOS ABD having the variable heavy and light domain pair of [ICOS]_H0 and [ICOS]L0 from FIG. 24; [ICOS]_H0.66 and [ICOS]_L0 from FIG. 24; Jmab-136[ICOS]vh and vl from FIG. 60; ICOS 314.8[ICOS]vh and vl from FIG. 60; H2L5[ICOS] vh and vl from FIG. 60; 37A10S713[ICOS] vh and vl from FIG. 60; C398.4A[ICOS] vh and vl from FIG. 60; ICOS.33[ICOS] vh and vl from FIG. 60; STIM001[ICOS] vh and vl from FIG. 60; or STIM003[ICOS] vh and vl from FIG. 60 with either the IL-15 N4D/N65D variant or the IL-15 D30N/N65D variant or the IL-15 D30N/E64Q/N65D variant.

[0396] In the ncIL15Rα+IL15-Fc x Fab-Fc format, one preferred embodiment utilizes the ICOS ABD having the variable heavy and light domain pair of [ICOS]_H0 and [ICOS]L0 from FIG. 24; [ICOS]_H0.66 and [ICOS]_L0 from FIG. 24; Jmab-136[ICOS]vh and vl from FIG. 60; ICOS 314.8[ICOS]vh and vl from FIG. 60; H2L5[ICOS] vh and vl from FIG. 60; 37A10S713[ICOS] vh and vl from FIG. 60; C398.4A[ICOS] vh and vl from FIG. 60; ICOS.33[ICOS] vh and vl from FIG. 60; STIM001[ICOS] vh and vl from FIG. 60; or STIM003[ICOS] vh and vl from FIG. 60, the skew variants S364K/E357Q (on a first Fc-containing monomer) and L368D/K370S (on the second corresponding Fc-containing monomer), the pI variants Q295E/N384D/Q418E/N421D (on either the first or the second Fc-containing monomer; and further comprising N208D if said Fc-containing monomer comprises CH1), the ablation variants E233P/L234V/L235A/G236_/S267K on both Fc-containing monomers, and optionally the 428L/434S variants on both Fc-containing monomers.

[0397] Additional useful human ICOS antigen binding domains for use in this ICOS-targeted x IL-15/IL-15Rα Fc fusion protein format include, but are not limited to, those listed in FIGS. 24, 60, and 62-64 (e.g., SEQ ID NOs:140-143, 179-242, 315-584) and the sequence listing (e.g., SEQ ID NOs:585-802).

[0398] M. dsIL15+IL15Rα-Fc x Fab-Fc

[0399] This embodiment is shown in FIG. 25M and comprises three monomers. The first monomer comprises, from N- to C-terminus, a variant IL-15Rα(sushi)domain-domain linker-CH2-CH3, wherein the variant IL-15Rα(sushi)domain has been engineered to contain a cysteine residue, and the second monomer comprises a heavy chain, VH-CH1-hinge-CH2-CH3. The third monomer is the variant IL-15 domain, also engineered to have a cysteine residue, such that a disulfide bridge is formed under native cellular conditions. This is generally referred to as “dsIL15+IL15Rα-Fc x Fab-Fc”, with the “ds” standing for “disulfide”.

[0400] In the dsIL15+IL15Rα-Fc x Fab-Fc format, one preferred embodiment utilizes the ICOS ABD having the variable heavy and light domain pair of [ICOS]_H0 and [ICOS]L0 from FIG. 24; [ICOS]_H0.66 and [ICOS]_L0 from FIG. 24; Jmab-136[ICOS]vh and vl from FIG. 60; ICOS 314.8[ICOS]vh and vl from FIG. 60; H2L5[ICOS] vh and vl from FIG. 60; 37A10S713[ICOS] vh and vl from FIG. 60; C398.4A[ICOS] vh and vl from FIG. 60; ICOS.33[ICOS] vh and vl from FIG. 60; STIM001[ICOS] vh and vl from FIG. 60; or STIM003[ICOS] vh and vl from FIG. 60.

[0401] In the dsIL15+IL15Rα-Fc x Fab-Fc format, one preferred embodiment utilizes the ICOS ABD having the variable heavy and light domain pair described herein with either the IL-15 N4D/N65D variant or the IL-15 D30N/N65D variant or the IL-15 D30N/E64Q/N65D variant, with the appropriate cysteine amino acid substitutions.

[0402] In the dsIL15+IL15Rα-Fc x Fab-Fc format, one preferred embodiment utilizes the skew variant pair S364K/E357Q:L368D/K370S.

[0403] In the dsIL15+IL15Rα-Fc x Fab-Fc format, one preferred embodiment utilizes the ICOS ABD having the variable heavy and light domain pair of [ICOS]_H0 and [ICOS]L0 from FIG. 24; [ICOS]_H0.66 and [ICOS]_L0 from FIG. 24; Jmab-136[ICOS]vh and vl from FIG. 60; ICOS 314.8[ICOS]vh and vl from FIG. 60; H2L5[ICOS] vh and vl from FIG. 60; 37A10S713[ICOS] vh and vl from FIG. 60; C398.4A[ICOS] vh and vl from FIG. 60; ICOS.33[ICOS] vh and vl from FIG. 60; STIM001[ICOS] vh and vl from FIG. 60; or STIM003[ICOS] vh and vl from FIG. 60 and the skew variant pair S364K/E357Q:L368D/K370S.

[0404] In the dsIL15+IL15Rα-Fc x Fab-Fc format, one preferred embodiment utilizes the ICOS ABD having the variable heavy and light domain pair of [ICOS]_H0 and [ICOS]L0 from FIG. 24; [ICOS]_H0.66 and [ICOS]_L0 from FIG. 24; Jmab-136[ICOS]vh and vl from FIG. 60; ICOS 314.8[ICOS]vh and vl from FIG. 60; H2L5[ICOS] vh and vl from FIG. 60; 37A10S713[ICOS] vh and vl from FIG. 60; C398.4A[ICOS] vh and vl from FIG. 60; ICOS.33[ICOS] vh and vl from FIG. 60; STIM001[ICOS] vh and vl from FIG. 60; or STIM003[ICOS] vh and vl from FIG. 60 and the skew variant pair S364K/E357Q:L368D/K370S with either the IL-15 N4D/N65D variant or the IL-15 D30N/N65D variant or the IL-15 D30N/E64Q/N65D variant with appropriate cysteine substitutions.

[0405] In the dsIL15+IL15Rα-Fc x Fab-Fc format, one preferred embodiment utilizes the ICOS ABD having the variable heavy and light domain pair of [ICOS]_H0 and [ICOS]L0 from FIG. 24; [ICOS]_H0.66 and [ICOS]_L0 from FIG. 24; Jmab-136[ICOS]vh and vl from FIG. 60; ICOS 314.8[ICOS]vh and vl from FIG. 60; H2L5[ICOS] vh and vl from FIG. 60; 37A10S713[ICOS] vh and vl from FIG. 60; C398.4A[ICOS] vh and vl from FIG. 60; ICOS.33[ICOS] vh and vl from FIG. 60; STIM001[ICOS] vh and vl from FIG. 60; or STIM003[ICOS] vh and vl from FIG. 60, the skew variants S364K/E357Q (on a first Fc-containing monomer) and L368D/K370S (on the second corresponding Fc-containing monomer), the pI variants Q295E/N384D/Q418E/N421D (on either the first or the second Fc-containing monomer; and further comprising N208D if said Fc-containing monomer comprises CH1), the ablation variants E233P/L234V/L235A/G236_/S267K on both Fc-containing monomers, and optionally the 428L/434S variants on both Fc-containing monomers.

[0406] Additional useful human ICOS antigen binding domains for use in this ICOS-targeted x IL-15/IL-15Rα Fc fusion protein format include, but are not limited to, those listed in FIGS. 24, 60, and 62-64 (e.g., SEQ ID NOs:140-143, 179-242, 315-584) and the sequence listing (e.g., SEQ ID NOs:585-802).

[0407] N. dsIL15Rα+IL15-Fc x Fab-Fc

[0408] This embodiment is shown in FIG. 25N and comprises three monomers. The first monomer comprises, from N- to C-terminus, a variant IL-15-domain linker-CH2-CH3, wherein the variant IL-15 has been engineered to contain a cysteine residue, and the second monomer comprises a heavy chain, VH-CH1-hinge-CH2-CH3. The third monomer is the variant IL-15Rα(sushi) domain, also engineered to have a cysteine residue, such that a disulfide bridge is formed under native cellular conditions. This is generally referred to as “dsIL15Rα+IL15-Fc x Fab-Fc”, with the “ds” standing for “disulfide”.

[0409] In the dsIL15Rα+IL15-Fc x Fab-Fc format, one preferred embodiment utilizes the ICOS ABD having the variable heavy and light domain pair of [ICOS]_H0 and [ICOS]L0 from FIG. 24; [ICOS]_H0.66 and [ICOS]_L0 from FIG. 24; Jmab-136[ICOS]vh and vl from FIG. 60; ICOS 314.8[ICOS]vh and vl from FIG. 60; H2L5[ICOS] vh and vl from FIG. 60; 37A10S713[ICOS] vh and vl from FIG. 60; C398.4A[ICOS] vh and vl from FIG. 60; ICOS.33[ICOS] vh and vl from FIG. 60; STIM001[ICOS] vh and vl from FIG. 60; or STIM003[ICOS] vh and vl from FIG. 60.

[0410] In the dsIL15Rα+IL15-Fc x Fab-Fc format, one preferred embodiment utilizes the ICOS ABD having the variable heavy and light domain pair described herein with either the IL-15 N4D/N65D variant or the IL-15 D30N/N65D variant or the IL-15 D30N/E64Q/N65D variant, with the appropriate cysteine amino acid substitutions.

[0411] In the dsIL15Rα+IL15-Fc x Fab-Fc format, one preferred embodiment utilizes the skew variant pair S364K/E357Q:L368D/K370S.

[0412] In the dsIL15Rα+IL15-Fc x Fab-Fc format, one preferred embodiment utilizes the ICOS ABD having the variable heavy and light domain pair of [ICOS]_H0 and [ICOS]L0 from FIG. 24; [ICOS]_H0.66 and [ICOS]_L0 from FIG. 24; Jmab-136[ICOS]vh and vl from FIG. 60; ICOS 314.8[ICOS]vh and vl from FIG. 60; H2L5[ICOS] vh and vl from FIG. 60; 37A10S713[ICOS] vh and vl from FIG. 60; C398.4A[ICOS] vh and vl from FIG. 60; ICOS.33[ICOS] vh and vl from FIG. 60; STIM001[ICOS] vh and vl from FIG. 60; or STIM003[ICOS] vh and vl from FIG. 60 and the skew variant pair S364K/E357Q:L368D/K370S.

[0413] In the dsIL15Rα+IL15-Fc x Fab-Fc format, one preferred embodiment utilizes the ICOS ABD having the variable heavy and light domain pair of [ICOS]_H0 and [ICOS]L0 from FIG. 24; [ICOS]_H0.66 and [ICOS]_L0 from FIG. 24; Jmab-136[ICOS]vh and vl from FIG. 60; ICOS 314.8[ICOS]vh and vl from FIG. 60; H2L5[ICOS] vh and vl from FIG. 60; 37A10S713[ICOS] vh and vl from FIG. 60; C398.4A[ICOS] vh and vl from FIG. 60; ICOS.33[ICOS] vh and vl from FIG. 60; STIM001[ICOS] vh and vl from FIG. 60; or STIM003[ICOS] vh and vl from FIG. 60 and the skew variant pair S364K/E357Q:L368D/K370S with either the IL-15 N4D/N65D variant or the IL-15 D30N/N65D variant or the IL-15 D30N/E64Q/N65D variant with appropriate cysteine substitutions.

[0414] In the dsIL15Rα+IL15-Fc x Fab-Fc format, one preferred embodiment utilizes the ICOS ABD having the variable heavy and light domain pair of [ICOS]_H0 and [ICOS]L0 from FIG. 24; [ICOS]_H0.66 and [ICOS]_L0 from FIG. 24; Jmab-136[ICOS]vh and vl from FIG. 60; ICOS 314.8[ICOS]vh and vl from FIG. 60; H2L5[ICOS] vh and vl from FIG. 60; 37A10S713[ICOS] vh and vl from FIG. 60; C398.4A[ICOS] vh and vl from FIG. 60; ICOS.33[ICOS] vh and vl from FIG. 60; STIM001[ICOS] vh and vl from FIG. 60; or STIM003[ICOS] vh and vl from FIG. 60, the skew variants S364K/E357Q (on the heavy chain) and L368D/K370S (on the dsIL15Rα+IL15-Fc side), the pI variants Q295E/N384D/Q418E/N421D (on either the first or the second Fc-containing monomer; and further comprising N208D if said Fc-containing monomer comprises CH1), the ablation variants E233P/L234V/L235A/G236_/S267K on both monomers, and optionally the 428L/434S variants on both sides.

[0415] Additional useful human ICOS antigen binding domains for use in this ICOS-targeted x IL-15/IL-15Rα Fc fusion protein format include, but are not limited to, those listed in FIGS. 24, 60, and 62-64 (e.g., SEQ ID NOs:140-143, 179-242, 315-584) and the sequence listing (e.g., SEQ ID NOs:585-802).

[0416] O. Fab-Fc-scIL15Rα-IL15 x Fab-Fc

[0417] This embodiment is shown in FIG. 25O, and comprises three monomers (although the fusion protein is a tetramer). The first monomer comprises a heavy chain, VH-CH1-hinge-CH2-CH3. The second monomer comprises a heavy chain with a C-terminal scIL15Rα-IL15 complex, VH-CH1-hinge-CH2-CH3-domain linker-IL-15Rα(sushi)domain-domain linker-IL-15 variant. The third (and fourth) monomer are light chains, VL-CL. This is generally referred to as “Fab-Fc-scIL15Rα-IL15 x Fab-Fc”, with the “sc” standing for “single chain”. This binds the ICOS molecule bivalently.

[0418] In the Fab-Fc-scIL15Rα-IL15 x Fab-Fc format, one preferred embodiment utilizes the ICOS ABD having any of the variable heavy and light domain pairs of [ICOS]_H0 and [ICOS]L0 from FIG. 24; [ICOS]_H0.66 and [ICOS]_L0 from FIG. 24; Jmab-136[ICOS]vh and vl from FIG. 60; ICOS 314.8[ICOS]vh and vl from FIG. 60; H2L5[ICOS] vh and vl from FIG. 60; 37A10S713[ICOS] vh and vl from FIG. 60; C398.4A[ICOS] vh and vl from FIG. 60; ICOS.33[ICOS] vh and vl from FIG. 60; STIM001[ICOS] vh and vl from FIG. 60; and STIM003[ICOS] vh and vl from FIG. 60.

[0419] In the Fab-Fc-scIL15Rα-IL15 x Fab-Fc format, one preferred embodiment utilizes the ICOS ABD having the variable heavy and light domain pair described herein, with either the IL-15 N4D/N65D variant or the IL-15 D30N/N65D variant or the IL-15 D30N/E64Q/N65D variant.

[0420] In the Fab-Fc-scIL15Rα-IL15 x Fab-Fc format, one preferred embodiment utilizes the skew variant pair S364K/E357Q:L368D/K370S.

[0421] In the Fab-Fc-scIL15Rα-IL15 x Fab-Fc format, one preferred embodiment utilizes the ICOS ABD having the variable heavy and light domain pair of [ICOS]_H0 and [ICOS]L0 from FIG. 24; [ICOS]_H0.66 and [ICOS]_L0 from FIG. 24; Jmab-136[ICOS]vh and vl from FIG. 60; ICOS 314.8[ICOS]vh and vl from FIG. 60; H2L5[ICOS] vh and vl from FIG. 60; 37A10S713[ICOS] vh and vl from FIG. 60; C398.4A[ICOS] vh and vl from FIG. 60; ICOS.33[ICOS] vh and vl from FIG. 60; STIM001[ICOS] vh and vl from FIG. 60; or STIM003[ICOS] vh and vl from FIG. 60 and the skew variant pair S364K/E357Q:L368D/K370S.

[0422] In the Fab-Fc-scIL15Rα-IL15 x Fab-Fc format, one preferred embodiment utilizes the ICOS ABD having the variable heavy and light domain pair of [ICOS]_H0 and [ICOS]L0 from FIG. 24; [ICOS]_H0.66 and [ICOS]_L0 from FIG. 24; Jmab-136[ICOS]vh and vl from FIG. 60; ICOS 314.8[ICOS]vh and vl from FIG. 60; H2L5[ICOS] vh and vl from FIG. 60; 37A10S713[ICOS] vh and vl from FIG. 60; C398.4A[ICOS] vh and vl from FIG. 60; ICOS.33[ICOS] vh and vl from FIG. 60; STIM001[ICOS] vh and vl from FIG. 60; or STIM003[ICOS] vh and vl from FIG. 60 and the skew variant pair S364K/E357Q:L368D/K370S with either the IL-15 N4D/N65D variant or the IL-15 D30N/N65D variant or the IL-15 D30N/E64Q/N65D variant.

[0423] In the Fab-Fc-scIL15Rα-IL15 x Fab-Fc format, one preferred embodiment utilizes the ICOS ABD having the variable heavy and light domain pair of [ICOS]_H0 and [ICOS]L0 from FIG. 24; [ICOS]_H0.66 and [ICOS]_L0 from FIG. 24; Jmab-136[ICOS]vh and vl from FIG. 60; ICOS 314.8[ICOS]vh and vl from FIG. 60; H2L5[ICOS] vh and vl from FIG. 60; 37A10S713[ICOS] vh and vl from FIG. 60; C398.4A[ICOS] vh and vl from FIG. 60; ICOS.33[ICOS] vh and vl from FIG. 60; STIM001[ICOS] vh and vl from FIG. 60; or STIM003[ICOS] vh and vl from FIG. 60, the skew variants S364K/E357Q (on a first Fc-containing monomer) and L368D/K370S (on the second corresponding Fc-containing monomer), the pI variants Q295E/N384D/Q418E/N421D (on either the first or the second Fc-containing monomer; and further comprising N208D if said Fc-containing monomer comprises CH1), the ablation variants E233P/L234V/L235A/G236_/S267K on both Fc-containing monomers, and optionally the 428L/434S variants on both Fc-containing monomers.

[0424] Additional useful human ICOS antigen binding domains for use in this ICOS-targeted x IL-15/IL-15Rα Fc fusion protein format include, but are not limited to, those listed in FIGS. 24, 60, and 62-64 (e.g., SEQ ID NOs:140-143, 179-242, 315-584) and the sequence listing (e.g., SEQ ID NOs:585-802).

[0425] P. Fab-Fc-scIL15-IL15Rα x Fab-Fc

[0426] This embodiment is shown in FIG. 25P, and comprises three monomers (although the fusion protein is a tetramer). The first monomer comprises a heavy chain, VH-CH1-hinge-CH2-CH3. The second monomer comprises a heavy chain with a C-terminal scIL15-IL15Rα complex, VH-CH1-hinge-CH2-CH3-domain linker-IL-15 variant-domain linker-IL-15Rα(sushi) domain. The third (and fourth) monomer are light chains, VL-CL. This is generally referred to as “Fab-Fc-scIL15-IL15Rα x Fab-Fc”, with the “sc” standing for “single chain”. This binds the ICOS molecule bivalently.

[0427] In the Fab-Fc-scIL15-IL15Rα x Fab-Fc format, one preferred embodiment utilizes the ICOS ABD having any of the variable heavy and light domain pairs of [ICOS]_H0 and [ICOS]L0 from FIG. 24; [ICOS]_H0.66 and [ICOS]_L0 from FIG. 24; Jmab-136[ICOS]vh and vl from FIG. 60; ICOS 314.8[ICOS]vh and vl from FIG. 60; H2L5[ICOS] vh and vl from FIG. 60; 37A10S713[ICOS] vh and vl from FIG. 60; C398.4A[ICOS] vh and vl from FIG. 60; ICOS.33[ICOS] vh and vl from FIG. 60; STIM001[ICOS] vh and vl from FIG. 60; and STIM003[ICOS] vh and vl from FIG. 60.

[0428] In the Fab-Fc-scIL15-IL15Rα x Fab-Fc format, one preferred embodiment utilizes the ICOS ABD having the variable heavy and light domain pair described herein, with either the IL-15 N4D/N65D variant or the IL-15 D30N/N65D variant or the IL-15 D30N/E64Q/N65D variant.

[0429] In the Fab-Fc-scIL15-IL15Rα x Fab-Fc format, one preferred embodiment utilizes the skew variant pair S364K/E357Q:L368D/K370S.

[0430] In the Fab-Fc-scIL15-IL15Rα x Fab-Fc format, one preferred embodiment utilizes the ICOS ABD having the variable heavy and light domain pair of [ICOS]_H0 and [ICOS]L0 from FIG. 24; [ICOS]_H0.66 and [ICOS]_L0 from FIG. 24; Jmab-136[ICOS]vh and vl from FIG. 60; ICOS 314.8[ICOS]vh and vl from FIG. 60; H2L5[ICOS] vh and vl from FIG. 60; 37A10S713[ICOS] vh and vl from FIG. 60; C398.4A[ICOS] vh and vl from FIG. 60; ICOS.33[ICOS] vh and vl from FIG. 60; STIM001[ICOS] vh and vl from FIG. 60; or STIM003[ICOS] vh and vl from FIG. 60 and the skew variant pair S364K/E357Q:L368D/K370S.

[0431] In the Fab-Fc-scIL15-IL15Rα x Fab-Fc format, one preferred embodiment utilizes the ICOS ABD having the variable heavy and light domain pair of [ICOS]_H0 and [ICOS]L0 from FIG. 24; [ICOS]_H0.66 and [ICOS]_L0 from FIG. 24; Jmab-136[ICOS]vh and vl from FIG. 60; ICOS 314.8[ICOS]vh and vl from FIG. 60; H2L5[ICOS] vh and vl from FIG. 60; 37A10S713[ICOS] vh and vl from FIG. 60; C398.4A[ICOS] vh and vl from FIG. 60; ICOS.33[ICOS] vh and vl from FIG. 60; STIM001[ICOS] vh and vl from FIG. 60; or STIM003[ICOS] vh and vl from FIG. 60 and the skew variant pair S364K/E357Q:L368D/K370S with either the IL-15 N4D/N65D variant or the IL-15 D30N/N65D variant or the IL-15 D30N/E64Q/N65D variant.

[0432] In the Fab-Fc-scIL15-IL15Rα x Fab-Fc format, one preferred embodiment utilizes the ICOS ABD having the variable heavy and light domain pair of [ICOS]_H0 and [ICOS]L0 from FIG. 24; [ICOS]_H0.66 and [ICOS]_L0 from FIG. 24; Jmab-136[ICOS]vh and vl from FIG. 60; ICOS 314.8[ICOS]vh and vl from FIG. 60; H2L5[ICOS] vh and vl from FIG. 60; 37A10S713[ICOS] vh and vl from FIG. 60; C398.4A[ICOS] vh and vl from FIG. 60; ICOS.33[ICOS] vh and vl from FIG. 60; STIM001[ICOS] vh and vl from FIG. 60; or STIM003[ICOS] vh and vl from FIG. 60, the skew variants S364K/E357Q (on a first Fc-containing monomer) and L368D/K370S (on the second corresponding Fc-containing monomer), the pI variants Q295E/N384D/Q418E/N421D (on either the first or the second Fc-containing monomer; and further comprising N208D if said Fc-containing monomer comprises CH1), the ablation variants E233P/L234V/L235A/G236_/S267K on both Fc-containing monomers, and optionally the 428L/434S variants on both Fc-containing monomers.

[0433] Additional useful human ICOS antigen binding domains for use in this ICOS-targeted x IL-15/IL-15Rα Fc fusion protein format include, but are not limited to, those listed in FIGS. 24, 60, and 62-64 (e.g., SEQ ID NOs:140-143, 179-242, 315-584) and the sequence listing (e.g., SEQ ID NOs:585-802).

[0434] Q. Fab-Fc-IL15 x Fab-Fc

[0435] This embodiment is shown in FIG. 25Q, and comprises three monomers (although the fusion protein is a tetramer). The first monomer comprises a heavy chain, VH-CH1-hinge-CH2-CH3. The second monomer comprises a heavy chain with a C-terminal IL15, VH-CH1-hinge-CH2-CH3-domain linker-IL-15 variant. The third (and fourth) monomer are light chains, VL-CL. This is generally referred to as “Fab-Fc-IL15 x Fab-Fc”. This binds the ICOS molecule bivalently. In another embodiment, the first monomer also comprises a C-terminal IL15, VH-CH1-hinge-CH2-CH3-domain linker-IL-15 variant, and is generally referred to as “Fab-Fc-IL15 x Fab-Fc IL15”.

[0436] In the Fab-Fc-IL15 x Fab-Fc format, one preferred embodiment utilizes the ICOS ABD having any of the variable heavy and light domain pairs of [ICOS]_H0 and [ICOS]L0 from FIG. 24; [ICOS]_H0.66 and [ICOS]_L0 from FIG. 24; Jmab-136[ICOS]vh and vl from FIG. 60; ICOS 314.8[ICOS]vh and vl from FIG. 60; H2L5[ICOS] vh and vl from FIG. 60; 37A10S713[ICOS] vh and vl from FIG. 60; C398.4A[ICOS] vh and vl from FIG. 60; ICOS.33[ICOS] vh and vl from FIG. 60; STIM001[ICOS] vh and vl from FIG. 60; and STIM003[ICOS] vh and vl from FIG. 60.

[0437] In the Fab-Fc-IL15 x Fab-Fc format, one preferred embodiment utilizes the ICOS ABD having the variable heavy and light domain pair described herein, with either the IL-15 N4D/N65D variant or the IL-15 D30N/N65D variant or the IL-15 D30N/E64Q/N65D variant.

[0438] In the Fab-Fc-IL15 x Fab-Fc format, one preferred embodiment utilizes the skew variant pair S364K/E357Q:L368D/K370S.

[0439] In the Fab-Fc-IL15 x Fab-Fc format, one preferred embodiment utilizes the ICOS ABD having the variable heavy and light domain pair of [ICOS]_H0 and [ICOS]L0 from FIG. 24; [ICOS]_H0.66 and [ICOS]_L0 from FIG. 24; Jmab-136[ICOS]vh and vl from FIG. 60; ICOS 314.8[ICOS]vh and vl from FIG. 60; H2L5[ICOS] vh and vl from FIG. 60; 37A10S713[ICOS] vh and vl from FIG. 60; C398.4A[ICOS] vh and vl from FIG. 60; ICOS.33[ICOS] vh and vl from FIG. 60; STIM001[ICOS] vh and vl from FIG. 60; or STIM003[ICOS] vh and vl from FIG. 60 and the skew variant pair S364K/E357Q:L368D/K370S.

[0440] In the Fab-Fc-IL15 x Fab-Fc format, one preferred embodiment utilizes the ICOS ABD having the variable heavy and light domain pair of [ICOS]_H0 and [ICOS]L0 from FIG. 24; [ICOS]_H0.66 and [ICOS]_L0 from FIG. 24; Jmab-136[ICOS]vh and vl from FIG. 60; ICOS 314.8[ICOS]vh and vl from FIG. 60; H2L5[ICOS] vh and vl from FIG. 60; 37A10S713[ICOS] vh and vl from FIG. 60; C398.4A[ICOS] vh and vl from FIG. 60; ICOS.33[ICOS] vh and vl from FIG. 60; STIM001[ICOS] vh and vl from FIG. 60; or STIM003[ICOS] vh and vl from FIG. 60 and the skew variant pair S364K/E357Q:L368D/K370S with either the IL-15 N4D/N65D variant or the IL-15 D30N/N65D variant or the IL-15 D30N/E64Q/N65D variant.

[0441] In the Fab-Fc-IL15 x Fab-Fc format, one preferred embodiment utilizes the ICOS ABD having the variable heavy and light domain pair of [ICOS]_H0 and [ICOS]L0 from FIG. 24; [ICOS]_H0.66 and [ICOS]_L0 from FIG. 24; Jmab-136[ICOS]vh and vl from FIG. 60; ICOS 314.8[ICOS]vh and vl from FIG. 60; H2L5[ICOS] vh and vl from FIG. 60; 37A10S713[ICOS] vh and vl from FIG. 60; C398.4A[ICOS] vh and vl from FIG. 60; ICOS.33[ICOS] vh and vl from FIG. 60; STIM001[ICOS] vh and vl from FIG. 60; or STIM003[ICOS] vh and vl from FIG. 60, the skew variants S364K/E357Q (on a first Fc-containing monomer) and L368D/K370S (on the second corresponding Fc-containing monomer), the pI variants Q295E/N384D/Q418E/N421D (on either the first or the second Fc-containing monomer; and further comprising N208D if said Fc-containing monomer comprises CH1), the ablation variants E233P/L234V/L235A/G236_/S267K on both Fc-containing monomers, and optionally the 428L/434S variants on both Fc-containing monomers.

[0442] R. Fab-Fc-IL15Rα+ncIL15 x Fab-Fc

[0443] This embodiment is shown in FIG. 25R, and comprises four monomers (although the heterodimeric fusion protein is a pentamer). The first monomer comprises a heavy chain, VH-CH1-hinge-CH2-CH3. The second monomer comprises a heavy chain with a C-terminal IL-15Rα(sushi) domain: e.g., VH-CH1-hinge-CH2-CH3-domain linker-IL-15Rα(sushi) domain. The third monomer is a variant IL-15 domain. The fourth (and fifth) monomer are light chains, VL-CL. This is generally referred to as “Fab-Fc-IL15Rα+ncIL15 x Fab-Fc”, with the “nc” standing for “non-covalent”. This also binds the ICOS bivalently.

[0444] In the Fab-Fc-IL15Rα+ncIL15 x Fab-Fc format, one preferred embodiment utilizes the ICOS ABD having the variable heavy and light domain pair of [ICOS]_H0 and [ICOS]L0 from FIG. 24; [ICOS]_H0.66 and [ICOS]_L0 from FIG. 24; Jmab-136[ICOS]vh and vl from FIG. 60; ICOS 314.8[ICOS]vh and vl from FIG. 60; H2L5[ICOS] vh and vl from FIG. 60; 37A10S713[ICOS] vh and vl from FIG. 60; C398.4A[ICOS] vh and vl from FIG. 60; ICOS.33[ICOS] vh and vl from FIG. 60; STIM001[ICOS] vh and vl from FIG. 60; or STIM003[ICOS] vh and vl from FIG. 60.

[0445] In the Fab-Fc-IL15Rα+ncIL15 x Fab-Fc format, one preferred embodiment utilizes the ICOS ABD having the variable heavy and light domain pair of [ICOS]_H0 and [ICOS]L0 from FIG. 24; [ICOS]_H0.66 and [ICOS]_L0 from FIG. 24; Jmab-136[ICOS]vh and vl from FIG. 60; ICOS 314.8[ICOS]vh and vl from FIG. 60; H2L5[ICOS] vh and vl from FIG. 60; 37A10S713[ICOS] vh and vl from FIG. 60; C398.4A[ICOS] vh and vl from FIG. 60; ICOS.33[ICOS] vh and vl from FIG. 60; STIM001[ICOS] vh and vl from FIG. 60; or STIM003[ICOS] vh and vl from FIG. 60, with either the IL-15 N4D/N65D variant or the IL-15 D30N/N65D variant or the IL-15 D30N/E64Q/N65D variant.

[0446] In the Fab-Fc-IL15Rα+ncIL15 x Fab-Fc format, one preferred embodiment utilizes the skew variant pair S364K/E357Q:L368D/K370S.

[0447] In the Fab-Fc-IL15Rα+ncIL15 x Fab-Fc format, one preferred embodiment utilizes the ICOS ABD having the variable heavy and light domain pair of [ICOS]_H0 and [ICOS]L0 from FIG. 24; [ICOS]_H0.66 and [ICOS]_L0 from FIG. 24; Jmab-136[ICOS]vh and vl from FIG. 60; ICOS 314.8[ICOS]vh and vl from FIG. 60; H2L5[ICOS] vh and vl from FIG. 60; 37A10S713[ICOS] vh and vl from FIG. 60; C398.4A[ICOS] vh and vl from FIG. 60; ICOS.33[ICOS] vh and vl from FIG. 60; STIM001[ICOS] vh and vl from FIG. 60; or STIM003[ICOS] vh and vl from FIG. 60 and the skew variant pair S364K/E357Q:L368D/K370S.

[0448] In the Fab-Fc-IL15Rα+ncIL15 x Fab-Fc format, one preferred embodiment utilizes the ICOS ABD having the variable heavy and light domain pair of [ICOS]_H0 and [ICOS]L0 from FIG. 24; [ICOS]_H0.66 and [ICOS]_L0 from FIG. 24; Jmab-136[ICOS]vh and vl from FIG. 60; ICOS 314.8[ICOS]vh and vl from FIG. 60; H2L5[ICOS] vh and vl from FIG. 60; 37A10S713[ICOS] vh and vl from FIG. 60; C398.4A[ICOS] vh and vl from FIG. 60; ICOS.33[ICOS] vh and vl from FIG. 60; STIM001[ICOS] vh and vl from FIG. 60; or STIM003[ICOS] vh and vl from FIG. 60 and the skew variant pair S364K/E357Q:L368D/K370S with either the IL-15 N4D/N65D variant or the IL-15 D30N/N65D variant or the IL-15 D30N/E64Q/N65D variant.

[0449] In the Fab-Fc-IL15Rα+ncIL15 x Fab-Fc format, one preferred embodiment utilizes the ICOS ABD having the variable heavy and light domain pair of [ICOS]_H0 and [ICOS]L0 from FIG. 24; [ICOS]_H0.66 and [ICOS]_L0 from FIG. 24; Jmab-136[ICOS]vh and vl from FIG. 60; ICOS 314.8[ICOS]vh and vl from FIG. 60; H2L5[ICOS] vh and vl from FIG. 60; 37A10S713[ICOS] vh and vl from FIG. 60; C398.4A[ICOS] vh and vl from FIG. 60; ICOS.33[ICOS] vh and vl from FIG. 60; STIM001[ICOS] vh and vl from FIG. 60; or STIM003[ICOS] vh and vl from FIG. 60, the skew variants S364K/E357Q (on a first Fc-containing monomer) and L368D/K370S (on the second corresponding Fc-containing monomer), the pI variants Q295E/N384D/Q418E/N421D (on either the first or the second Fc-containing monomer; and further comprising N208D if said Fc-containing monomer comprises CH1), the ablation variants E233P/L234V/L235A/G236_/S267K on both Fc-containing monomers, and optionally the 428L/434S variants on Fc-containing monomers.

[0450] Additional useful human ICOS antigen binding domains for use in this ICOS-targeted x IL-15/IL-15Rα Fc fusion protein format include, but are not limited to, those listed in FIGS. 24, 60, and 62-64 (e.g., SEQ ID NOs:140-143, 179-242, 315-584) and the sequence listing (e.g., SEQ ID NOs:585-802).

[0451] S. Fab-Fc-IL15+ncIL15Rα x Fab-Fc

[0452] This embodiment is shown in FIG. 25S, and comprises four monomers (although the heterodimeric fusion protein is a pentamer). The first monomer comprises a heavy chain, VH-CH1-hinge-CH2-CH3. The second monomer comprises a heavy chain with a C-terminal variant IL-15: e.g., VH-CH1-hinge-CH2-CH3-domain linker-IL-15. The third monomer is a IL-15Rα(sushi) domain. The fourth (and fifth) monomer are light chains, VL-CL. This is generally referred to as “Fab-Fc-IL15+ncIL15Rα x Fab-Fc”, with the “nc” standing for “non-covalent”. This also binds the ICOS bivalently.

[0453] In the Fab-Fc-IL15+ncIL15Rα x Fab-Fc format, one preferred embodiment utilizes the ICOS ABD having the variable heavy and light domain pair of [ICOS]_H0 and [ICOS]L0 from FIG. 24; [ICOS]_H0.66 and [ICOS]_L0 from FIG. 24; Jmab-136[ICOS]vh and vl from FIG. 60; ICOS 314.8[ICOS]vh and vl from FIG. 60; H2L5[ICOS] vh and vl from FIG. 60; 37A10S713[ICOS] vh and vl from FIG. 60; C398.4A[ICOS] vh and vl from FIG. 60; ICOS.33[ICOS] vh and vl from FIG. 60; STIM001[ICOS] vh and vl from FIG. 60; or STIM003[ICOS] vh and vl from FIG. 60.

[0454] In the Fab-Fc-IL15+ncIL15Rα x Fab-Fc format, one preferred embodiment utilizes the ICOS ABD having the variable heavy and light domain pair of [ICOS]_H0 and [ICOS]L0 from FIG. 24; [ICOS]_H0.66 and [ICOS]_L0 from FIG. 24; Jmab-136[ICOS]vh and vl from FIG. 60; ICOS 314.8[ICOS]vh and vl from FIG. 60; H2L5[ICOS] vh and vl from FIG. 60; 37A10S713[ICOS] vh and vl from FIG. 60; C398.4A[ICOS] vh and vl from FIG. 60; ICOS.33[ICOS] vh and vl from FIG. 60; STIM001[ICOS] vh and vl from FIG. 60; or STIM003[ICOS] vh and vl from FIG. 60, with either the IL-15 N4D/N65D variant or the IL-15 D30N/N65D variant or the IL-15 D30N/E64Q/N65D variant.

[0455] In the Fab-Fc-IL15+ncIL15Rα x Fab-Fc format, one preferred embodiment utilizes the skew variant pair S364K/E357Q:L368D/K370S.

[0456] In the Fab-Fc-IL15+ncIL15Rα x Fab-Fc format, one preferred embodiment utilizes the ICOS ABD having the variable heavy and light domain pair of [ICOS]_H0 and [ICOS]L0 from FIG. 24; [ICOS]_H0.66 and [ICOS]_L0 from FIG. 24; Jmab-136[ICOS]vh and vl from FIG. 60; ICOS 314.8[ICOS]vh and vl from FIG. 60; H2L5[ICOS] vh and vl from FIG. 60; 37A10S713[ICOS] vh and vl from FIG. 60; C398.4A[ICOS] vh and vl from FIG. 60; ICOS.33[ICOS] vh and vl from FIG. 60; STIM001[ICOS] vh and vl from FIG. 60; or STIM003[ICOS] vh and vl from FIG. 60 and the skew variant pair S364K/E357Q:L368D/K370S.

[0457] In the Fab-Fc-IL15+ncIL15Rα x Fab-Fc format, one preferred embodiment utilizes the ICOS ABD having the variable heavy and light domain pair of [ICOS]_H0 and [ICOS]L0 from FIG. 24; [ICOS]_H0.66 and [ICOS]_L0 from FIG. 24; Jmab-136[ICOS]vh and vl from FIG. 60; ICOS 314.8[ICOS]vh and vl from FIG. 60; H2L5[ICOS] vh and vl from FIG. 60; 37A10S713[ICOS] vh and vl from FIG. 60; C398.4A[ICOS] vh and vl from FIG. 60; ICOS.33[ICOS] vh and vl from FIG. 60; STIM001[ICOS] vh and vl from FIG. 60; or STIM003[ICOS] vh and vl from FIG. 60 and the skew variant pair S364K/E357Q:L368D/K370S with either the IL-15 N4D/N65D variant or the IL-15 D30N/N65D variant or the IL-15 D30N/E64Q/N65D variant.

[0458] In the Fab-Fc-IL15+ncIL15Rα x Fab-Fc format, one preferred embodiment utilizes the ICOS ABD having the variable heavy and light domain pair of [ICOS]_H0 and [ICOS]L0 from FIG. 24; [ICOS]_H0.66 and [ICOS]_L0 from FIG. 24; Jmab-136[ICOS]vh and vl from FIG. 60; ICOS 314.8[ICOS]vh and vl from FIG. 60; H2L5[ICOS] vh and vl from FIG. 60; 37A10S713[ICOS] vh and vl from FIG. 60; C398.4A[ICOS] vh and vl from FIG. 60; ICOS.33[ICOS] vh and vl from FIG. 60; STIM001[ICOS] vh and vl from FIG. 60; or STIM003[ICOS] vh and vl from FIG. 60, the skew variants S364K/E357Q (on a first Fc-containing monomer) and L368D/K370S (on the second corresponding Fc-containing monomer on the second corresponding Fc-containing monomer), the pI variants Q295E/N384D/Q418E/N421D (on either the first or the second Fc-containing monomer; and further comprising N208D if said Fc-containing monomer comprises CH1), the ablation variants E233P/L234V/L235A/G236_/S267K on both Fc-containing monomers, and optionally the 428L/434S variants on both Fc-containing monomers.

[0459] Additional useful human ICOS antigen binding domains for use in this ICOS-targeted x IL-15/IL-15Rα Fc fusion protein format include, but are not limited to, those listed in FIGS. 24, 60, and 62-64 (e.g., SEQ ID NOs:140-143, 179-242, 315-584) and the sequence listing (e.g., SEQ ID NOs:585-802).

[0460] T. Fab-Fc-IL15 x Fab-Fc-IL15Rα

[0461] This embodiment is shown in FIG. 25T, and comprises three monomers (although the fusion protein is a tetramer). The first monomer comprises a heavy chain with a C-terminal variant IL-15: e.g. VH-CH1-hinge-CH2-CH3-domain linker-IL-15. The second monomer comprises a heavy chain with a C-terminal IL15Rα(sushi) domain: e.g. VH-CH1-hinge-CH2-CH3-domain linker-IL-15Rα(sushi) domain. The third (and fourth) monomer are light chains, VL-CL. This is generally referred to as “Fab-Fc-IL15 x Fab-Fc-IL15Rα”. This binds the ICOS molecule bivalently.

[0462] In the Fab-Fc-IL15 x Fab-Fc-IL15Rα format, one preferred embodiment utilizes the ICOS ABD having any of the variable heavy and light domain pairs of [ICOS]_H0 and [ICOS]L0 from FIG. 24; [ICOS]_H0.66 and [ICOS]_L0 from FIG. 24; Jmab-136[ICOS]vh and vl from FIG. 60; ICOS 314.8[ICOS]vh and vl from FIG. 60; H2L5[ICOS] vh and vl from FIG. 60; 37A10S713[ICOS] vh and vl from FIG. 60; C398.4A[ICOS] vh and vl from FIG. 60; ICOS.33[ICOS] vh and vl from FIG. 60; STIM001[ICOS] vh and vl from FIG. 60; and STIM003[ICOS] vh and vl from FIG. 60.

[0463] In the Fab-Fc-IL15 x Fab-Fc-IL15Rα format, one preferred embodiment utilizes the ICOS ABD having the variable heavy and light domain pair described herein, with either the IL-15 N4D/N65D variant or the IL-15 D30N/N65D variant or the IL-15 D30N/E64Q/N65D variant.

[0464] In the Fab-Fc-IL15 x Fab-Fc-IL15Rα format, one preferred embodiment utilizes the skew variant pair S364K/E357Q:L368D/K370S.

[0465] In the Fab-Fc-IL15 x Fab-Fc-IL15Rα format, one preferred embodiment utilizes the ICOS ABD having the variable heavy and light domain pair of [ICOS]_H0 and [ICOS]L0 from FIG. 24; [ICOS]_H0.66 and [ICOS]_L0 from FIG. 24; Jmab-136[ICOS]vh and vl from FIG. 60; ICOS 314.8[ICOS]vh and vl from FIG. 60; H2L5[ICOS] vh and vl from FIG. 60; 37A10S713[ICOS] vh and vl from FIG. 60; C398.4A[ICOS] vh and vl from FIG. 60; ICOS.33[ICOS] vh and vl from FIG. 60; STIM001[ICOS] vh and vl from FIG. 60; or STIM003[ICOS] vh and vl from FIG. 60 and the skew variant pair S364K/E357Q:L368D/K370S.

[0466] In the Fab-Fc-IL15 x Fab-Fc-IL15Rα format, one preferred embodiment utilizes the ICOS ABD having the variable heavy and light domain pair of [ICOS]_H0 and [ICOS]L0 from FIG. 24; [ICOS]_H0.66 and [ICOS]_L0 from FIG. 24; Jmab-136[ICOS]vh and vl from FIG. 60; ICOS 314.8[ICOS]vh and vl from FIG. 60; H2L5[ICOS] vh and vl from FIG. 60; 37A10S713[ICOS] vh and vl from FIG. 60; C398.4A[ICOS] vh and vl from FIG. 60; ICOS.33[ICOS] vh and vl from FIG. 60; STIM001[ICOS] vh and vl from FIG. 60; or STIM003[ICOS] vh and vl from FIG. 60 and the skew variant pair S364K/E357Q:L368D/K370S with either the IL-15 N4D/N65D variant or the IL-15 D30N/N65D variant or the IL-15 D30N/E64Q/N65D variant.

[0467] In the Fab-Fc-IL15 x Fab-Fc-IL15Rα format, one preferred embodiment utilizes the ICOS ABD having the variable heavy and light domain pair of [ICOS]_H0 and [ICOS]L0 from FIG. 24; [ICOS]_H0.66 and [ICOS]_L0 from FIG. 24; Jmab-136[ICOS]vh and vl from FIG. 60; ICOS 314.8[ICOS]vh and vl from FIG. 60; H2L5[ICOS] vh and vl from FIG. 60; 37A10S713[ICOS] vh and vl from FIG. 60; C398.4A[ICOS] vh and vl from FIG. 60; ICOS.33[ICOS] vh and vl from FIG. 60; STIM001[ICOS] vh and vl from FIG. 60; or STIM003[ICOS] vh and vl from FIG. 60, the skew variants S364K/E357Q (on a first Fc-containing monomer) and L368D/K370S (on the second corresponding Fc-containing monomer), the pI variants Q295E/N384D/Q418E/N421D (on either the first or the second Fc-containing monomer; and further comprising N208D if said Fc-containing monomer comprises CH1), the ablation variants E233P/L234V/L235A/G236_/S267K on both Fc-containing monomers, and optionally the 428L/434S variants on both Fc-containing monomers.

[0468] Additional useful human ICOS antigen binding domains for use in this ICOS-targeted x IL-15/IL-15Rα Fc fusion protein format include, but are not limited to, those listed in FIGS. 24, 60, and 62-64 (e.g., SEQ ID NOs:140-143, 179-242, 315-584) and the sequence listing (e.g., SEQ ID NOs:585-802).

[0469] U. Fab-Fc-IL15Rα+dsIL15 x Fab-Fc

[0470] This embodiment is shown in FIG. 25U and comprises four monomers (although the heterodimeric fusion protein is a pentamer). The first monomer comprises a heavy chain, VH-CH1-hinge-CH2-CH3. The second monomer comprises a heavy chain with a C-terminal variant IL-15Rα(sushi) domain: e.g., VH-CH1-hinge-CH2-CH3-domain linker-IL-15Rα(sushi) domain, where the IL-15Rα(sushi) domain has been engineered to contain a cysteine residue. The third monomer is a variant IL-15 domain, which has been engineered to contain a cysteine residue, such that the IL-15 complex is formed under physiological conditions. The fourth (and fifth) monomer are light chains, VL-CL. This is generally referred to as “Fab-Fc-IL15Rα+dsIL15 x Fab-Fc”, with the “ds” standing for “disulfide”, and it binds ICOS bivalently.

[0471] In the Fab-Fc-IL15Rα+dsIL15 x Fab-Fc format, one preferred embodiment utilizes the ICOS ABD having the variable heavy and light domain pair of [ICOS]_H0 and [ICOS]L0 from FIG. 24; [ICOS]_H0.66 and [ICOS]_L0 from FIG. 24; Jmab-136[ICOS]vh and vl from FIG. 60; ICOS 314.8[ICOS]vh and vl from FIG. 60; H2L5[ICOS] vh and vl from FIG. 60; 37A10S713[ICOS] vh and vl from FIG. 60; C398.4A[ICOS] vh and vl from FIG. 60; ICOS.33[ICOS] vh and vl from FIG. 60; STIM001[ICOS] vh and vl from FIG. 60; or STIM003[ICOS] vh and vl from FIG. 60.

[0472] In the Fab-Fc-IL15Rα+dsIL15 x Fab-Fc format, one preferred embodiment utilizes the ICOS ABD having the variable heavy and light domain pair of [ICOS]_H0 and [ICOS]_L0 from FIG. 24; [ICOS]_H0.66 and [ICOS]_L0 from FIG. 24; Jmab-136[ICOS]vh and vl from FIG. 60; ICOS 314.8[ICOS]vh and vl from FIG. 60; H2L5[ICOS] vh and vl from FIG. 60; 37A10S713[ICOS] vh and vl from FIG. 60; C398.4A[ICOS] vh and vl from FIG. 60; ICOS.33[ICOS] vh and vl from FIG. 60; STIM001[ICOS] vh and vl from FIG. 60; or STIM003[ICOS] vh and vl from FIG. 60, with either the IL-15 N4D/N65D variant or the IL-15 D30N/N65D variant or the IL-15 D30N/E64Q/N65D variant, with the appropriate cysteine amino acid substitutions.

[0473] In the Fab-Fc-IL15Rα+dsIL15 x Fab-Fc format, one preferred embodiment utilizes the skew variant pair S364K/E357Q:L368D/K370S.

[0474] In the Fab-Fc-IL15Rα+dsIL15 x Fab-Fc format, one preferred embodiment utilizes the ICOS ABD having the variable heavy and light domain pair of [ICOS]_H0 and [ICOS]L0 from FIG. 24; [ICOS]_H0.66 and [ICOS]_L0 from FIG. 24; Jmab-136[ICOS]vh and vl from FIG. 60; ICOS 314.8[ICOS]vh and vl from FIG. 60; H2L5[ICOS] vh and vl from FIG. 60; 37A10S713[ICOS] vh and vl from FIG. 60; C398.4A[ICOS] vh and vl from FIG. 60; ICOS.33[ICOS] vh and vl from FIG. 60; STIM001[ICOS] vh and vl from FIG. 60; or STIM003[ICOS] vh and vl from FIG. 60 and the skew variant pair S364K/E357Q:L368D/K370S.

[0475] In the Fab-Fc-IL15Rα+dsIL15 x Fab-Fc format, one preferred embodiment utilizes the ICOS ABD having the variable heavy and light domain pair of [ICOS]_H0 and [ICOS]L0 from FIG. 24; [ICOS]_H0.66 and [ICOS]_L0 from FIG. 24; Jmab-136[ICOS]vh and vl from FIG. 60; ICOS 314.8[ICOS]vh and vl from FIG. 60; H2L5[ICOS] vh and vl from FIG. 60; 37A10S713[ICOS] vh and vl from FIG. 60; C398.4A[ICOS] vh and vl from FIG. 60; ICOS.33[ICOS] vh and vl from FIG. 60; STIM001[ICOS] vh and vl from FIG. 60; or STIM003[ICOS] vh and vl from FIG. 60 and the skew variant pair S364K/E357Q:L368D/K370S with either the IL-15 N4D/N65D variant or the IL-15 D30N/N65D variant or the IL-15 D30N/E64Q/N65D variant with appropriate cysteine substitutions.

[0476] In the Fab-Fc-IL15Rα+dsIL15 x Fab-Fc format, one preferred embodiment utilizes the ICOS ABD the variable heavy and light domain pair of [ICOS]_H0 and [ICOS]L0 from FIG. 24; [ICOS]_H0.66 and [ICOS]_L0 from FIG. 24; Jmab-136[ICOS]vh and vl from FIG. 60; ICOS 314.8[ICOS]vh and vl from FIG. 60; H2L5[ICOS] vh and vl from FIG. 60; 37A10S713[ICOS] vh and vl from FIG. 60; C398.4A[ICOS] vh and vl from FIG. 60; ICOS.33[ICOS] vh and vl from FIG. 60; STIM001[ICOS] vh and vl from FIG. 60; or STIM003[ICOS] vh and vl from FIG. 60, the skew variants S364K/E357Q (on a first Fc-containing monomer) and L368D/K370S (on the second corresponding Fc-containing monomer), the pI variants Q295E/N384D/Q418E/N421D (on either the first or the second Fc-containing monomer; and further comprising N208D if said Fc-containing monomer comprises CH1), the ablation variants E233P/L234V/L235A/G236_/S267K on both Fc-containing monomers, and optionally the 428L/434S variants on both Fc-containing monomers.

[0477] Additional useful human ICOS antigen binding domains for use in this ICOS-targeted x IL-15/IL-15Rα Fc fusion protein format include, but are not limited to, those listed in FIGS. 24, 60, and 62-64 (e.g., SEQ ID NOs:140-143, 179-242, 315-584) and the sequence listing (e.g., SEQ ID NOs:585-802).

[0478] V. Fab-Fc-IL15+dsIL15Rα x Fab-Fc

[0479] This embodiment is shown in FIG. 25V and comprises four monomers (although the heterodimeric fusion protein is a pentamer). The first monomer comprises a heavy chain, VH-CH1-hinge-CH2-CH3. The second monomer comprises a heavy chain with a C-terminal variant IL-15 domain: e.g., VH-CH1-hinge-CH2-CH3-domain linker-IL-15 domain, where the variant IL-15 domain has been engineered to contain a cysteine residue. The third monomer is a variant IL-15Rα(sushi) domain, which has been engineered to contain a cysteine residue, such that the IL-15 complex is formed under physiological conditions. The fourth (and fifth) monomer are light chains, VL-CL. This is generally referred to as “Fab-Fc-IL15+dsIL15Rα x Fab-Fc”, with the “ds” standing for “disulfide”, and it binds ICOS bivalently.

[0480] In the Fab-Fc-IL15+dsIL15Rα x Fab-Fc format, one preferred embodiment utilizes the ICOS ABD having the variable heavy and light domain pair of [ICOS]_H0 and [ICOS]L0 from FIG. 24; [ICOS]_H0.66 and [ICOS]_L0 from FIG. 24; Jmab-136[ICOS]vh and vl from FIG. 60; ICOS 314.8[ICOS]vh and vl from FIG. 60; H2L5[ICOS] vh and vl from FIG. 60; 37A10S713[ICOS] vh and vl from FIG. 60; C398.4A[ICOS] vh and vl from FIG. 60; ICOS.33[ICOS] vh and vl from FIG. 60; STIM001[ICOS] vh and vl from FIG. 60; or STIM003[ICOS] vh and vl from FIG. 60.

[0481] In the Fab-Fc-IL15+dsIL15Rα x Fab-Fc format, one preferred embodiment utilizes the ICOS ABD having the variable heavy and light domain pair of [ICOS]_H0 and [ICOS]L0 from FIG. 24; [ICOS]_H0.66 and [ICOS]_L0 from FIG. 24; Jmab-136[ICOS]vh and vl from FIG. 60; ICOS 314.8[ICOS]vh and vl from FIG. 60; H2L5[ICOS] vh and vl from FIG. 60; 37A10S713[ICOS] vh and vl from FIG. 60; C398.4A[ICOS] vh and vl from FIG. 60; ICOS.33[ICOS] vh and vl from FIG. 60; STIM001[ICOS] vh and vl from FIG. 60; or STIM003[ICOS] vh and vl from FIG. 60, with either the IL-15 N4D/N65D variant or the IL-15 D30N/N65D variant or the IL-15 D30N/E64Q/N65D variant, with the appropriate cysteine amino acid substitutions.

[0482] In the Fab-Fc-IL15+dsIL15Rα x Fab-Fc format, one preferred embodiment utilizes the skew variant pair S364K/E357Q:L368D/K370S.

[0483] In the Fab-Fc-IL15+dsIL15Rα x Fab-Fc format, one preferred embodiment utilizes the ICOS ABD having the variable heavy and light domain pair of [ICOS]_H0 and [ICOS]L0 from FIG. 24; [ICOS]_H0.66 and [ICOS]_L0 from FIG. 24; Jmab-136[ICOS]vh and vl from FIG. 60; ICOS 314.8[ICOS]vh and vl from FIG. 60; H2L5[ICOS] vh and vl from FIG. 60; 37A10S713[ICOS] vh and vl from FIG. 60; C398.4A[ICOS] vh and vl from FIG. 60; ICOS.33[ICOS] vh and vl from FIG. 60; STIM001[ICOS] vh and vl from FIG. 60; or STIM003[ICOS] vh and vl from FIG. 60 and the skew variant pair S364K/E357Q:L368D/K370S.

[0484] In the Fab-Fc-IL15+dsIL15Rα x Fab-Fc format, one preferred embodiment utilizes the ICOS ABD having the variable heavy and light domain pair of [ICOS]_H0 and [ICOS]L0 from FIG. 24; [ICOS]_H0.66 and [ICOS]_L0 from FIG. 24; Jmab-136[ICOS]vh and vl from FIG. 60; ICOS 314.8[ICOS]vh and vl from FIG. 60; H2L5[ICOS] vh and vl from FIG. 60; 37A10S713[ICOS] vh and vl from FIG. 60; C398.4A[ICOS] vh and vl from FIG. 60; ICOS.33[ICOS] vh and vl from FIG. 60; STIM001[ICOS] vh and vl from FIG. 60; or STIM003[ICOS] vh and vl from FIG. 60 and the skew variant pair S364K/E357Q:L368D/K370S with either the IL-15 N4D/N65D variant or the IL-15 D30N/N65D variant or the IL-15 D30N/E64Q/N65D variant with appropriate cysteine substitutions.

[0485] In the Fab-Fc-IL15+dsIL15Rα x Fab-Fc format, one preferred embodiment utilizes the ICOS ABD the variable heavy and light domain pair of [ICOS]_H0 and [ICOS]L0 from FIG. 24; [ICOS]_H0.66 and [ICOS]_L0 from FIG. 24; Jmab-136[ICOS]vh and vl from FIG. 60; ICOS 314.8[ICOS]vh and vl from FIG. 60; H2L5[ICOS] vh and vl from FIG. 60; 37A10S713[ICOS] vh and vl from FIG. 60; C398.4A[ICOS] vh and vl from FIG. 60; ICOS.33[ICOS] vh and vl from FIG. 60; STIM001[ICOS] vh and vl from FIG. 60; or STIM003[ICOS] vh and vl from FIG. 60, the skew variants S364K/E357Q (on a first Fc-containing monomer) and L368D/K370S (on the second corresponding Fc-containing monomer), the pI variants Q295E/N384D/Q418E/N421D (on either the first or the second Fc-containing monomer; and further comprising N208D if said Fc-containing monomer comprises CH1), the ablation variants E233P/L234V/L235A/G236_/S267K on both Fc-containing monomers, and optionally the 428L/434S variants on both Fc-containing monomers.

[0486] Additional useful human ICOS antigen binding domains for use in this ICOS-targeted x IL-15/IL-15Rα Fc fusion protein format include, but are not limited to, those listed in FIGS. 24, 60, and 62-64 (e.g., SEQ ID NOs:140-143, 179-242, 315-584) and the sequence listing (e.g., SEQ ID NOs:585-802).

[0487] W. Fab-Fc-IL15 x Fab-Fc-IL15Rα w/ ds

[0488] This embodiment is shown in FIG. 25W, and comprises three monomers (although the fusion protein is a tetramer). The first monomer comprises a heavy chain with a C-terminal variant IL-15: e.g. VH-CH1-hinge-CH2-CH3-domain linker-IL-15, where the variant IL-15 domain has been engineered to contain a cysteine residue. The second monomer comprises a heavy chain with a C-terminal variant IL15Rα(sushi) domain: e.g. VH-CH1-hinge-CH2-CH3-domain linker-IL-15Rα(sushi) domain, which has been engineered to contain a cysteine residue, such that the IL-15 complex is formed under physiological conditions. The third (and fourth) monomer are light chains, VL-CL. This is generally referred to as “Fab-Fc-IL15 x Fab-Fc-IL15Rα w/ ds”. This binds the ICOS molecule bivalently.

[0489] In the Fab-Fc-IL15 x Fab-Fc-IL15Rα w/ ds format, one preferred embodiment utilizes the ICOS ABD having any of the variable heavy and light domain pairs of [ICOS]_H0 and [ICOS]L0 from FIG. 24; [ICOS]_H0.66 and [ICOS]_L0 from FIG. 24; Jmab-136[ICOS]vh and vl from FIG. 60; ICOS 314.8[ICOS]vh and vl from FIG. 60; H2L5[ICOS] vh and vl from FIG. 60; 37A10S713[ICOS] vh and vl from FIG. 60; C398.4A[ICOS] vh and vl from FIG. 60; ICOS.33[ICOS] vh and vl from FIG. 60; STIM001[ICOS] vh and vl from FIG. 60; and STIM003[ICOS] vh and vl from FIG. 60.

[0490] In the Fab-Fc-IL15 x Fab-Fc-IL15Rα w/ ds format, one preferred embodiment utilizes the ICOS ABD having the variable heavy and light domain pair described herein, with either the IL-15 N4D/N65D variant or the IL-15 D30N/N65D variant or the IL-15 D30N/E64Q/N65D variant.

[0491] In the Fab-Fc-IL15 x Fab-Fc-IL15Rα w/ ds format, one preferred embodiment utilizes the skew variant pair S364K/E357Q:L368D/K370S.

[0492] In the Fab-Fc-IL15 x Fab-Fc-IL15Rα w/ ds format, one preferred embodiment utilizes the ICOS ABD having the variable heavy and light domain pair of [ICOS]_H0 and [ICOS]L0 from FIG. 24; [ICOS]_H0.66 and [ICOS]_L0 from FIG. 24; Jmab-136[ICOS]vh and vl from FIG. 60; ICOS 314.8[ICOS]vh and vl from FIG. 60; H2L5[ICOS] vh and vl from FIG. 60; 37A10S713[ICOS] vh and vl from FIG. 60; C398.4A[ICOS] vh and vl from FIG. 60; ICOS.33[ICOS] vh and vl from FIG. 60; STIM001[ICOS] vh and vl from FIG. 60; or STIM003[ICOS] vh and vl from FIG. 60 and the skew variant pair S364K/E357Q:L368D/K370S.

[0493] In the Fab-Fc-IL15 x Fab-Fc-IL15Rα w/ ds format, one preferred embodiment utilizes the ICOS ABD having the variable heavy and light domain pair of [ICOS]_H0 and [ICOS]L0 from FIG. 24; [ICOS]_H0.66 and [ICOS]_L0 from FIG. 24; Jmab-136[ICOS]vh and vl from FIG. 60; ICOS 314.8[ICOS]vh and vl from FIG. 60; H2L5[ICOS] vh and vl from FIG. 60; 37A10S713[ICOS] vh and vl from FIG. 60; C398.4A[ICOS] vh and vl from FIG. 60; ICOS.33[ICOS] vh and vl from FIG. 60; STIM001[ICOS] vh and vl from FIG. 60; or STIM003[ICOS] vh and vl from FIG. 60 and the skew variant pair S364K/E357Q:L368D/K370S with either the IL-15 N4D/N65D variant or the IL-15 D30N/N65D variant or the IL-15 D30N/E64Q/N65D variant.

[0494] In the Fab-Fc-IL15 x Fab-Fc-IL15Rα w/ ds format, one preferred embodiment utilizes the ICOS ABD having the variable heavy and light domain pair of [ICOS]_H0 and [ICOS]L0 from FIG. 24; [ICOS]_H0.66 and [ICOS]_L0 from FIG. 24; Jmab-136[ICOS]vh and vl from FIG. 60; ICOS 314.8[ICOS]vh and vl from FIG. 60; H2L5[ICOS] vh and vl from FIG. 60; 37A10S713[ICOS] vh and vl from FIG. 60; C398.4A[ICOS] vh and vl from FIG. 60; ICOS.33[ICOS] vh and vl from FIG. 60; STIM001[ICOS] vh and vl from FIG. 60; or STIM003[ICOS] vh and vl from FIG. 60, the skew variants S364K/E357Q (on a first Fc-containing monomer) and L368D/K370S (on the second corresponding Fc-containing monomer), the pI variants Q295E/N384D/Q418E/N421D (on either the first or the second Fc-containing monomer; and further comprising N208D if said Fc-containing monomer comprises CH1), the ablation variants E233P/L234V/L235A/G236_/S267K on both Fc-containing monomers, and optionally the 428L/434S variants on both Fc-containing monomers.

[0495] Additional useful human ICOS antigen binding domains for use in this ICOS-targeted x IL-15/IL-15Rα Fc fusion protein format include, but are not limited to, those listed in FIGS. 24, 60, and 62-64 (e.g., SEQ ID NOs:140-143, 179-242, 315-584) and the sequence listing (e.g., SEQ ID NOs:585-802).

[0496] X. Fab-Fc-IL15-Fc x Fab-IL15Rα-Fc

[0497] This embodiment is shown in FIG. 25X, and comprises four monomers forming a tetramer. The first monomer comprises a VH-CH1-[optional domain linker]-IL-15 variant-[optional domain linker]-CH2-CH3, with the second optional domain linker sometimes being the hinge domain. The second monomer comprises a VH-CH1-[optional domain linker]-IL-15Rα(sushi) domain-[optional domain linker]-CH2-CH3, with the second optional domain linker sometimes being the hinge domain. The third (and fourth) monomers are light chains, VL-CL. This is generally referred to as “central-IL-15/Rα”.

[0498] The “Fab-Fc-IL15-Fc x Fab-IL15Rα-Fc” format (FIG. 25X) comprises a VH-CH1 recombinantly fused to the N-terminus of IL-15 which is then further fused to one side of a heterodimeric Fc and a VH-CH1 recombinantly fused to the N-terminus of IL-15Rα(sushi) which is then further fused to the other side of the heterodimeric Fc wherein each side of the heterodimeric Fc comprises complementary skew variants, while corresponding light chains are transfected separately so as to form Fabs with the VH-CH1s.

[0499] In the Fab-Fc-IL15-Fc x Fab-IL15Rα-Fc format, one preferred embodiment utilizes the ICOS ABD having the variable heavy and light domain pair of [ICOS]_H0 and [ICOS]L0 from FIG. 24; [ICOS]_H0.66 and [ICOS]_L0 from FIG. 24; Jmab-136[ICOS]vh and vl from FIG. 60; ICOS 314.8[ICOS]vh and vl from FIG. 60; H2L5[ICOS] vh and vl from FIG. 60; 37A10S713[ICOS] vh and vl from FIG. 60; C398.4A[ICOS] vh and vl from FIG. 60; ICOS.33[ICOS] vh and vl from FIG. 60; STIM001[ICOS] vh and vl from FIG. 60; or STIM003[ICOS] vh and vl from FIG. 60.

[0500] In the Fab-Fc-IL15-Fc x Fab-IL15Rα-Fc format, one preferred embodiment utilizes the ICOS ABD having the variable heavy and light domain pair of [ICOS]_H0 and [ICOS]L0 from FIG. 24; [ICOS]_H0.66 and [ICOS]_L0 from FIG. 24; Jmab-136[ICOS]vh and vl from FIG. 60; ICOS 314.8[ICOS]vh and vl from FIG. 60; H2L5[ICOS] vh and vl from FIG. 60; 37A10S713[ICOS] vh and vl from FIG. 60; C398.4A[ICOS] vh and vl from FIG. 60; ICOS.33[ICOS] vh and vl from FIG. 60; STIM001[ICOS] vh and vl from FIG. 60; or STIM003[ICOS] vh and vl from FIG. 60, with either the IL-15 N4D/N65D variant or the IL-15 D30N/N65D variant or the IL-15 D30N/E64Q/N65D variant, with the appropriate cysteine amino acid substitutions.

[0501] In the Fab-Fc-IL15-Fc x Fab-IL15Rα-Fc format, one preferred embodiment utilizes the skew variant pair S364K/E357Q:L368D/K370S.

[0502] In the Fab-Fc-IL15-Fc x Fab-IL15Rα-Fc format, one preferred embodiment utilizes the ICOS ABD having the variable heavy and light domain pair of [ICOS]_H0 and [ICOS]L0 from FIG. 24; [ICOS]_H0.66 and [ICOS]_L0 from FIG. 24; Jmab-136[ICOS]vh and vl from FIG. 60; ICOS 314.8[ICOS]vh and vl from FIG. 60; H2L5[ICOS] vh and vl from FIG. 60; 37A10S713[ICOS] vh and vl from FIG. 60; C398.4A[ICOS] vh and vl from FIG. 60; ICOS.33[ICOS] vh and vl from FIG. 60; STIM001[ICOS] vh and vl from FIG. 60; or STIM003[ICOS] vh and vl from FIG. 60 and the skew variant pair S364K/E357Q:L368D/K370S.

[0503] In the Fab-Fc-IL15-Fc x Fab-IL15Rα-Fc format, one preferred embodiment utilizes the ICOS ABD having the variable heavy and light domain pair of [ICOS]_H0 and [ICOS]L0 from FIG. 24; [ICOS]_H0.66 and [ICOS]_L0 from FIG. 24; Jmab-136[ICOS]vh and vl from FIG. 60; ICOS 314.8[ICOS]vh and vl from FIG. 60; H2L5[ICOS] vh and vl from FIG. 60; 37A10S713[ICOS] vh and vl from FIG. 60; C398.4A[ICOS] vh and vl from FIG. 60; ICOS.33[ICOS] vh and vl from FIG. 60; STIM001[ICOS] vh and vl from FIG. 60; or STIM003[ICOS] vh and vl from FIG. 60 and the skew variant pair S364K/E357Q:L368D/K370S with either the IL-15 N4D/N65D variant or the IL-15 D30N/E64Q/N65D variant with appropriate cysteine substitutions.

[0504] In the Fab-Fc-IL15-Fc x Fab-IL15Rα-Fc format, one preferred embodiment utilizes the ICOS ABD the variable heavy and light domain pair of [ICOS]_H0 and [ICOS]L0 from FIG. 24; [ICOS]_H0.66 and [ICOS]_L0 from FIG. 24; Jmab-136[ICOS]vh and vl from FIG. 60; ICOS 314.8[ICOS]vh and vl from FIG. 60; H2L5[ICOS] vh and vl from FIG. 60; 37A10S713[ICOS] vh and vl from FIG. 60; C398.4A[ICOS] vh and vl from FIG. 60; ICOS.33[ICOS] vh and vl from FIG. 60; STIM001[ICOS] vh and vl from FIG. 60; or STIM003[ICOS] vh and vl from FIG. 60, the skew variants S364K/E357Q (on a first Fc-containing monomer) and L368D/K370S (on the second corresponding Fc-containing monomer), the pI variants Q295E/N384D/Q418E/N421D (on either the first or the second Fc-containing monomer; and further comprising N208D if said Fc-containing monomer comprises CH1), the ablation variants E233P/L234V/L235A/G236_/S267K on both Fc-containing monomers, and optionally the 428L/434S variants on both Fc-containing monomers.

[0505] Additional useful human ICOS antigen binding domains for use in this ICOS-targeted x IL-15/IL-15Rα Fc fusion protein format include, but are not limited to, those listed in FIGS. 24, 60, and 62-64 (e.g., SEQ ID NOs:140-143, 179-242, 315-584) and the sequence listing (e.g., SEQ ID NOs:585-802).

[0506] Y. Fab-Fc-IL15-Fc x Fab-IL15Rα-Fc w/ ds

[0507] This embodiment is shown in FIG. 25Y, and comprises four monomers forming a tetramer. The first monomer comprises a VH-CH1-[optional domain linker]-IL-15 variant-[optional domain linker]-CH2-CH3, with the second optional domain linker sometimes being the hinge domain, where the variant IL-15 domain has been engineered to contain a cysteine residue. The second monomer comprises a VH-CH1-[optional domain linker]-IL-15Rα(sushi) domain-[optional domain linker]-CH2-CH3, with the second optional domain linker sometimes being the hinge domain, where the variant IL-15Rα(sushi) has been engineered to contain a cysteine residue, such that the IL-15 complex is formed under physiological conditions. The third (and fourth) monomers are light chains, VL-CL. This is generally referred to as “Fab-Fc-IL15-Fc x Fab-IL15Rα-Fc w/ ds”.

[0508] In the Fab-Fc-IL15-Fc x Fab-IL15Rα-Fc w/ ds format, one preferred embodiment utilizes the ICOS ABD having the variable heavy and light domain pair of [ICOS]_H0 and [ICOS]L0 from FIG. 24; [ICOS]_H0.66 and [ICOS]_L0 from FIG. 24; Jmab-136[ICOS]vh and vl from FIG. 60; ICOS 314.8[ICOS]vh and vl from FIG. 60; H2L5[ICOS] vh and vl from FIG. 60; 37A10S713[ICOS] vh and vl from FIG. 60; C398.4A[ICOS] vh and vl from FIG. 60; ICOS.33[ICOS] vh and vl from FIG. 60; STIM001[ICOS] vh and vl from FIG. 60; or STIM003[ICOS] vh and vl from FIG. 60.

[0509] In the Fab-Fc-IL15-Fc x Fab-IL15Rα-Fc w/ ds format, one preferred embodiment utilizes the ICOS ABD having the variable heavy and light domain pair of [ICOS]_H0 and [ICOS]L0 from FIG. 24; [ICOS]_H0.66 and [ICOS]_L0 from FIG. 24; Jmab-136[ICOS]vh and vl from FIG. 60; ICOS 314.8[ICOS]vh and vl from FIG. 60; H2L5[ICOS] vh and vl from FIG. 60; 37A10S713[ICOS] vh and vl from FIG. 60; C398.4A[ICOS] vh and vl from FIG. 60; ICOS.33[ICOS] vh and vl from FIG. 60; STIM001[ICOS] vh and vl from FIG. 60; or STIM003[ICOS] vh and vl from FIG. 60, with either the IL-15 N4D/N65D variant or the IL-15 D30N/N65D variant or the IL-15 D30N/E64Q/N65D variant, with the appropriate cysteine amino acid substitutions.

[0510] In the Fab-Fc-IL15-Fc x Fab-IL15Rα-Fc w/ ds format, one preferred embodiment utilizes the skew variant pair S364K/E357Q:L368D/K370S.

[0511] In the Fab-Fc-IL15-Fc x Fab-IL15Rα-Fc w/ ds format, one preferred embodiment utilizes the ICOS ABD having the variable heavy and light domain pair of [ICOS]_H0 and [ICOS]L0 from FIG. 24; [ICOS]_H0.66 and [ICOS]_L0 from FIG. 24; Jmab-136[ICOS]vh and vl from FIG. 60; ICOS 314.8[ICOS]vh and vl from FIG. 60; H2L5[ICOS] vh and vl from FIG. 60; 37A10S713[ICOS] vh and vl from FIG. 60; C398.4A[ICOS] vh and vl from FIG. 60; ICOS.33[ICOS] vh and vl from FIG. 60; STIM001[ICOS] vh and vl from FIG. 60; or STIM003[ICOS] vh and vl from FIG. 60 and the skew variant pair S364K/E357Q:L368D/K370S.

[0512] In the Fab-Fc-IL15-Fc x Fab-IL15Rα-Fc w/ ds format, one preferred embodiment utilizes the ICOS ABD having the variable heavy and light domain pair of [ICOS]_H0 and [ICOS]L0 from FIG. 24; [ICOS]_H0.66 and [ICOS]_L0 from FIG. 24; Jmab-136[ICOS]vh and vl from FIG. 60; ICOS 314.8[ICOS]vh and vl from FIG. 60; H2L5[ICOS] vh and vl from FIG. 60; 37A10S713[ICOS] vh and vl from FIG. 60; C398.4A[ICOS] vh and vl from FIG. 60; ICOS.33[ICOS] vh and vl from FIG. 60; STIM001[ICOS] vh and vl from FIG. 60; or STIM003[ICOS] vh and vl from FIG. 60 and the skew variant pair S364K/E357Q:L368D/K370S with either the IL-15 N4D/N65D variant or the IL-15 D30N/E64Q/N65D variant with appropriate cysteine substitutions.

[0513] In the Fab-Fc-IL15-Fc x Fab-IL15Rα-Fc w/ ds format, one preferred embodiment utilizes the ICOS ABD the variable heavy and light domain pair of [ICOS]_H0 and [ICOS]_L0 from FIG. 24; [ICOS]_H0.66 and [ICOS]_L0 from FIG. 24; Jmab-136[ICOS]vh and vl from FIG. 60; ICOS 314.8[ICOS]vh and vl from FIG. 60; H2L5[ICOS] vh and vl from FIG. 60; 37A10S713[ICOS] vh and vl from FIG. 60; C398.4A[ICOS] vh and vl from FIG. 60; ICOS.33[ICOS] vh and vl from FIG. 60; STIM001[ICOS] vh and vl from FIG. 60; or STIM003[ICOS] vh and vl from FIG. 60, the skew variants S364K/E357Q (on a first Fc-containing monomer) and L368D/K370S (on the second corresponding Fc-containing monomer), the pI variants Q295E/N384D/Q418E/N421D (on either the first or the second Fc-containing monomer; and further comprising N208D if said Fc-containing monomer comprises CH1), the ablation variants E233P/L234V/L235A/G236_/S267K on both Fc-containing monomers, and optionally the 428L/434S variants on both Fc-containing monomers.

[0514] Additional useful human ICOS antigen binding domains for use in this ICOS-targeted x IL-15/IL-15Rα Fc fusion protein format include, but are not limited to, those listed in FIGS. 24, 60, and 62-64 (e.g., SEQ ID NOs:140-143, 179-242, 315-584) and the sequence listing (e.g., SEQ ID NOs:585-802).

[0515] Z. Fab-IL15-Fc x Fab-IL15-Fc

[0516] This embodiment is shown in FIG. 25Z, and comprises four monomers forming a tetramer. The first and second monomer comprises a VH-CH1-[optional domain linker]-IL-15 variant-[optional domain linker]-CH2-CH3, with the second optional domain linker sometimes being the hinge domain. The third (and fourth) monomers are light chains, VL-CL. This is generally referred to as “Fab-IL15-Fc x Fab-IL15-Fc”.

[0517] In the Fab-Fc-IL15-Fc x Fab-IL15-Fc format, one preferred embodiment utilizes the ICOS ABD having the variable heavy and light domain pair of [ICOS]_H0 and [ICOS]L0 from FIG. 24; [ICOS]_H0.66 and [ICOS]_L0 from FIG. 24; Jmab-136[ICOS]vh and vl from FIG. 60; ICOS 314.8[ICOS]vh and vl from FIG. 60; H2L5[ICOS] vh and vl from FIG. 60; 37A10S713[ICOS] vh and vl from FIG. 60; C398.4A[ICOS] vh and vl from FIG. 60; ICOS.33[ICOS] vh and vl from FIG. 60; STIM001[ICOS] vh and vl from FIG. 60; or STIM003[ICOS] vh and vl from FIG. 60.

[0518] In the Fab-Fc-IL15-Fc x Fab-IL15-Fc format, one preferred embodiment utilizes the ICOS ABD having the variable heavy and light domain pair of [ICOS]_H0 and [ICOS]L0 from FIG. 24; [ICOS]_H0.66 and [ICOS]_L0 from FIG. 24; Jmab-136[ICOS]vh and vl from FIG. 60; ICOS 314.8[ICOS]vh and vl from FIG. 60; H2L5[ICOS] vh and vl from FIG. 60; 37A10S713[ICOS] vh and vl from FIG. 60; C398.4A[ICOS] vh and vl from FIG. 60; ICOS.33[ICOS] vh and vl from FIG. 60; STIM001[ICOS] vh and vl from FIG. 60; or STIM003[ICOS] vh and vl from FIG. 60, with either the IL-15 N4D/N65D variant or the IL-15 D30N/N65D variant or the IL-15 D30N/E64Q/N65D variant.

[0519] In the Fab-Fc-IL15-Fc x Fab-IL15-Fc format, one preferred embodiment utilizes the ICOS ABD having the variable heavy and light domain pair of [ICOS]_H0 and [ICOS]L0 from FIG. 24; [ICOS]_H0.66 and [ICOS]_L0 from FIG. 24; Jmab-136[ICOS]vh and vl from FIG. 60; ICOS 314.8[ICOS]vh and vl from FIG. 60; H2L5[ICOS] vh and vl from FIG. 60; 37A10S713[ICOS] vh and vl from FIG. 60; C398.4A[ICOS] vh and vl from FIG. 60; ICOS.33[ICOS] vh and vl from FIG. 60; STIM001[ICOS] vh and vl from FIG. 60; or STIM003[ICOS] vh and vl from FIG. 60.

[0520] In the Fab-Fc-IL15-Fc x Fab-IL15-Fc format, one preferred embodiment utilizes the ICOS ABD having the variable heavy and light domain pair of [ICOS]_H0 and [ICOS]L0 from FIG. 24; [ICOS]_H0.66 and [ICOS]_L0 from FIG. 24; Jmab-136[ICOS]vh and vl from FIG. 60; ICOS 314.8[ICOS]vh and vl from FIG. 60; H2L5[ICOS] vh and vl from FIG. 60; 37A10S713[ICOS] vh and vl from FIG. 60; C398.4A[ICOS] vh and vl from FIG. 60; ICOS.33[ICOS] vh and vl from FIG. 60; STIM001[ICOS] vh and vl from FIG. 60; or STIM003[ICOS] vh and vl from FIG. 60 and the skew variant pair S364K/E357Q:L368D/K370S with either the IL-15 N4D/N65D variant or the IL-15 D30N/E64Q/N65D variant.

[0521] In the Fab-Fc-IL15-Fc x Fab-IL15-Fc format, one preferred embodiment utilizes the ICOS ABD the variable heavy and light domain pair of [ICOS]_H0 and [ICOS]L0 from FIG. 24; [ICOS]_H0.66 and [ICOS]_L0 from FIG. 24; Jmab-136[ICOS]vh and vl from FIG. 60; ICOS 314.8[ICOS]vh and vl from FIG. 60; H2L5[ICOS] vh and vl from FIG. 60; 37A10S713[ICOS] vh and vl from FIG. 60; C398.4A[ICOS] vh and vl from FIG. 60; ICOS.33[ICOS] vh and vl from FIG. 60; STIM001[ICOS] vh and vl from FIG. 60; or STIM003[ICOS] vh and vl from FIG. 60 and the ablation variants E233P/L234V/L235A/G236_/S267K on both monomers, and optionally the 428L/434S variants on both sides.

[0522] Additional useful human ICOS antigen binding domains for use in this ICOS-targeted x IL-15/IL-15Rα Fc fusion protein format include, but are not limited to, those listed in FIGS. 24, 60, and 62-64 (e.g., SEQ ID NOs:140-143, 179-242, 315-584) and the sequence listing (e.g., SEQ ID NOs:585-802).

[0523] AA. Fab-scIL15Rα-IL15-Fc x Fab-Fc

[0524] This embodiment is shown in FIG. 25AA, and comprises four monomers forming a tetramer. The first monomer comprises a VH-CH1-[optional domain linker]-IL-15Rα(sushi) domain-domain linker-IL-15 variant-[optional domain linker]-CH2-CH3, with the second optional domain linker sometimes being the hinge domain. The second monomer comprises a VH-CH1-hinge-CH2-CH3. The third (and fourth) monomers are light chains, VL-CL. This is generally referred to as “Fab-scIL15Rα-IL15-Fc x Fab-Fc”, with the “sc” standing for “single chain”.

[0525] In the Fab-scIL15Rα-IL15-Fc x Fab-Fc format, one preferred embodiment utilizes the ICOS ABD having the variable heavy and light domain pair of [ICOS]_H0 and [ICOS]L0 from FIG. 24; [ICOS]_H0.66 and [ICOS]_L0 from FIG. 24; Jmab-136[ICOS]vh and vl from FIG. 60; ICOS 314.8[ICOS]vh and vl from FIG. 60; H2L5[ICOS] vh and vl from FIG. 60; 37A10S713[ICOS] vh and vl from FIG. 60; C398.4A[ICOS] vh and vl from FIG. 60; ICOS.33[ICOS] vh and vl from FIG. 60; STIM001[ICOS] vh and vl from FIG. 60; or STIM003[ICOS] vh and vl from FIG. 60.

[0526] In the Fab-scIL15Rα-IL15-Fc x Fab-Fc format, one preferred embodiment utilizes the ICOS ABD having the variable heavy and light domain pair of [ICOS]_H0 and [ICOS]L0 from FIG. 24; [ICOS]_H0.66 and [ICOS]_L0 from FIG. 24; Jmab-136[ICOS]vh and vl from FIG. 60; ICOS 314.8[ICOS]vh and vl from FIG. 60; H2L5[ICOS] vh and vl from FIG. 60; 37A10S713[ICOS] vh and vl from FIG. 60; C398.4A[ICOS] vh and vl from FIG. 60; ICOS.33[ICOS] vh and vl from FIG. 60; STIM001[ICOS] vh and vl from FIG. 60; and STIM003[ICOS] vh and vl from FIG. 60, with either the IL-15 N4D/N65D variant or the IL-15 D30N/N65D variant or the IL-15 D30N/E64Q/N65D variant.

[0527] In the Fab-scIL15Rα-IL15-Fc x Fab-Fc format, one preferred embodiment utilizes the skew variant pair S364K/E357Q:L368D/K370S.

[0528] In the Fab-scIL15Rα-IL15-Fc x Fab-Fc format, one preferred embodiment utilizes the ICOS ABD having the variable heavy and light domain pair of [ICOS]_H0 and [ICOS]L0 from FIG. 24; [ICOS]_H0.66 and [ICOS]_L0 from FIG. 24; Jmab-136[ICOS]vh and vl from FIG. 60; ICOS 314.8[ICOS]vh and vl from FIG. 60; H2L5[ICOS] vh and vl from FIG. 60; 37A10S713[ICOS] vh and vl from FIG. 60; C398.4A[ICOS] vh and vl from FIG. 60; ICOS.33[ICOS] vh and vl from FIG. 60; STIM001[ICOS] vh and vl from FIG. 60; or STIM003[ICOS] vh and vl from FIG. 60 and the skew variant pair S364K/E357Q:L368D/K370S.

[0529] In the Fab-scIL15Rα-IL15-Fc x Fab-Fc format, one preferred embodiment utilizes the ICOS ABD having the variable heavy and light domain pair of [ICOS]_H0 and [ICOS]L0 from FIG. 24; [ICOS]_H0.66 and [ICOS]_L0 from FIG. 24; Jmab-136[ICOS]vh and vl from FIG. 60; ICOS 314.8[ICOS]vh and vl from FIG. 60; H2L5[ICOS] vh and vl from FIG. 60; 37A10S713[ICOS] vh and vl from FIG. 60; C398.4A[ICOS] vh and vl from FIG. 60; ICOS.33[ICOS] vh and vl from FIG. 60; STIM001[ICOS] vh and vl from FIG. 60; or STIM003[ICOS] vh and vl from FIG. 60. with either the IL-15 N4D/N65D variant or the IL-15 D30N/N65D variant or the IL-15 D30N/E64Q/N65D variant.

[0530] In the Fab-scIL15Rα-IL15-Fc x Fab-Fc format, one preferred embodiment utilizes the ICOS ABD having the variable heavy and light domain pair of [ICOS]_H0 and [ICOS]L0 from FIG. 24; [ICOS]_H0.66 and [ICOS]_L0 from FIG. 24; Jmab-136[ICOS]vh and vl from FIG. 60; ICOS 314.8[ICOS]vh and vl from FIG. 60; H2L5[ICOS] vh and vl from FIG. 60; 37A10S713[ICOS] vh and vl from FIG. 60; C398.4A[ICOS] vh and vl from FIG. 60; ICOS.33[ICOS] vh and vl from FIG. 60; STIM001[ICOS] vh and vl from FIG. 60; or STIM003[ICOS] vh and vl from FIG. 60, the skew variants S364K/E357Q (on a first Fc-containing monomer) and L368D/K370S (on the second corresponding Fc-containing monomer), the pI variants Q295E/N384D/Q418E/N421D (on either the first or the second Fc-containing monomer; and further comprising N208D if said Fc-containing monomer comprises CH1), the ablation variants E233P/L234V/L235A/G236_/S267K on both Fc-containing monomers, and optionally the 428L/434S variants on both Fc-containing monomers.

[0531] Additional useful human ICOS antigen binding domains for use in this ICOS-targeted x IL-15/IL-15Rα Fc fusion protein format include, but are not limited to, those listed in FIGS. 24, 60, and 62-64 (e.g., SEQ ID NOs:140-143, 179-242, 315-584) and the sequence listing (e.g., SEQ ID NOs:585-802).

[0532] BB. Fab-scIL15-IL15Rα-Fc x Fab-Fc

[0533] This embodiment is shown in FIG. 25BB, and comprises four monomers forming a tetramer. The first monomer comprises a VH-CH1-[optional domain linker]-IL-15 variant-domain linker-IL-15Rα(sushi) domain-[optional domain linker]-CH2-CH3, with the second optional domain linker sometimes being the hinge domain. The second monomer comprises a VH-CH1-hinge-CH2-CH3. The third (and fourth) monomers are light chains, VL-CL. This is generally referred to as “Fab-scIL15-IL15Rα-Fc x Fab-Fc”, with the “sc” standing for “single chain”.

[0534] In the Fab-scIL15-IL15Rα-Fc x Fab-Fc format, one preferred embodiment utilizes the ICOS ABD having the variable heavy and light domain pair of [ICOS]_H0 and [ICOS]L0 from FIG. 24; [ICOS]_H0.66 and [ICOS]_L0 from FIG. 24; Jmab-136[ICOS]vh and vl from FIG. 60; ICOS 314.8[ICOS]vh and vl from FIG. 60; H2L5[ICOS] vh and vl from FIG. 60; 37A10S713[ICOS] vh and vl from FIG. 60; C398.4A[ICOS] vh and vl from FIG. 60; ICOS.33[ICOS] vh and vl from FIG. 60; STIM001[ICOS] vh and vl from FIG. 60; or STIM003[ICOS] vh and vl from FIG. 60.

[0535] In the Fab-scIL15-IL15Rα-Fc x Fab-Fc format, one preferred embodiment utilizes the ICOS ABD having the variable heavy and light domain pair of [ICOS]_H0 and [ICOS]L0 from FIG. 24; [ICOS]_H0.66 and [ICOS]_L0 from FIG. 24; Jmab-136[ICOS]vh and vl from FIG. 60; ICOS 314.8[ICOS]vh and vl from FIG. 60; H2L5[ICOS] vh and vl from FIG. 60; 37A10S713[ICOS] vh and vl from FIG. 60; C398.4A[ICOS] vh and vl from FIG. 60; ICOS.33[ICOS] vh and vl from FIG. 60; STIM001[ICOS] vh and vl from FIG. 60; and STIM003[ICOS] vh and vl from FIG. 60, with either the IL-15 N4D/N65D variant or the IL-15 D30N/N65D variant or the IL-15 D30N/E64Q/N65D variant.

[0536] In the Fab-scIL15-IL15Rα-Fc x Fab-Fc format, one preferred embodiment utilizes the skew variant pair S364K/E357Q:L368D/K370S.

[0537] In the Fab-scIL15-IL15Rα-Fc x Fab-Fc format, one preferred embodiment utilizes the ICOS ABD having the variable heavy and light domain pair of [ICOS]_H0 and [ICOS]L0 from FIG. 24; [ICOS]_H0.66 and [ICOS]_L0 from FIG. 24; Jmab-136[ICOS]vh and vl from FIG. 60; ICOS 314.8[ICOS]vh and vl from FIG. 60; H2L5[ICOS] vh and vl from FIG. 60; 37A10S713[ICOS] vh and vl from FIG. 60; C398.4A[ICOS] vh and vl from FIG. 60; ICOS.33[ICOS] vh and vl from FIG. 60; STIM001[ICOS] vh and vl from FIG. 60; or STIM003[ICOS] vh and vl from FIG. 60 and the skew variant pair S364K/E357Q:L368D/K370S.

[0538] In the Fab-scIL15-IL15Rα-Fc x Fab-Fc format, one preferred embodiment utilizes the ICOS ABD having the variable heavy and light domain pair of [ICOS]_H0 and [ICOS]L0 from FIG. 24; [ICOS]_H0.66 and [ICOS]_L0 from FIG. 24; Jmab-136[ICOS]vh and vl from FIG. 60; ICOS 314.8[ICOS]vh and vl from FIG. 60; H2L5[ICOS] vh and vl from FIG. 60; 37A10S713[ICOS] vh and vl from FIG. 60; C398.4A[ICOS] vh and vl from FIG. 60; ICOS.33[ICOS] vh and vl from FIG. 60; STIM001[ICOS] vh and vl from FIG. 60; or STIM003[ICOS] vh and vl from FIG. 60. with either the IL-15 N4D/N65D variant or the IL-15 D30N/N65D variant or the IL-15 D30N/E64Q/N65D variant.

[0539] In the Fab-scIL15-IL15Rα-Fc x Fab-Fc format, one preferred embodiment utilizes the ICOS ABD having the variable heavy and light domain pair of [ICOS]_H0 and [ICOS]L0 from FIG. 24; [ICOS]_H0.66 and [ICOS]_L0 from FIG. 24; Jmab-136[ICOS]vh and vl from FIG. 60; ICOS 314.8[ICOS]vh and vl from FIG. 60; H2L5[ICOS] vh and vl from FIG. 60; 37A10S713[ICOS] vh and vl from FIG. 60; C398.4A[ICOS] vh and vl from FIG. 60; ICOS.33[ICOS] vh and vl from FIG. 60; STIM001[ICOS] vh and vl from FIG. 60; or STIM003[ICOS] vh and vl from FIG. 60, the skew variants S364K/E357Q (on a first Fc-containing monomer) and L368D/K370S (on the second corresponding Fc-containing monomer), the pI variants Q295E/N384D/Q418E/N421D (on either the first or the second Fc-containing monomer; and further comprising N208D if said Fc-containing monomer comprises CH1), the ablation variants E233P/L234V/L235A/G236_/S267K on both Fc-containing monomers, and optionally the 428L/434S variants on both Fc-containing monomers.

[0540] Additional useful human ICOS antigen binding domains for use in this ICOS-targeted x IL-15/IL-15Rα Fc fusion protein format include, but are not limited to, those listed in FIGS. 24, 60, and 62-64 (e.g., SEQ ID NOs:140-143, 179-242, 315-584) and the sequence listing (e.g., SEQ ID NOs:585-802).

[0541] CC. Fab-IL15-Fc x Fab-Fc

[0542] This embodiment is shown in FIG. 25CC, and comprises four monomers forming a tetramer. The first monomer comprises a VH-CH1-[optional domain linker]-IL-15 variant-[optional domain linker]-CH2-CH3, with the second optional domain linker sometimes being the hinge domain. The second monomer comprises a VH-CH1-hinge-CH2-CH3. The third (and fourth) monomers are light chains, VL-CL. This is generally referred to as “Fab-IL15-Fc x Fab-Fc”.

[0543] In the Fab-IL15-Fc x Fab-Fc format, one preferred embodiment utilizes the ICOS ABD having the variable heavy and light domain pair of [ICOS]_H0 and [ICOS]L0 from FIG. 24; [ICOS]_H0.66 and [ICOS]_L0 from FIG. 24; Jmab-136[ICOS]vh and vl from FIG. 60; ICOS 314.8[ICOS]vh and vl from FIG. 60; H2L5[ICOS] vh and vl from FIG. 60; 37A10S713[ICOS] vh and vl from FIG. 60; C398.4A[ICOS] vh and vl from FIG. 60; ICOS.33[ICOS] vh and vl from FIG. 60; STIM001[ICOS] vh and vl from FIG. 60; or STIM003[ICOS] vh and vl from FIG. 60.

[0544] In the Fab-IL15-Fc x Fab-Fc format, one preferred embodiment utilizes the ICOS ABD having the variable heavy and light domain pair of [ICOS]_H0 and [ICOS]L0 from FIG. 24; [ICOS]_H0.66 and [ICOS]_L0 from FIG. 24; Jmab-136[ICOS]vh and vl from FIG. 60; ICOS 314.8[ICOS]vh and vl from FIG. 60; H2L5[ICOS] vh and vl from FIG. 60; 37A10S713[ICOS] vh and vl from FIG. 60; C398.4A[ICOS] vh and vl from FIG. 60; ICOS.33[ICOS] vh and vl from FIG. 60; STIM001[ICOS] vh and vl from FIG. 60; and STIM003[ICOS] vh and vl from FIG. 60, with either the IL-15 N4D/N65D variant or the IL-15 D30N/N65D variant or the IL-15 D30N/E64Q/N65D variant.

[0545] In the Fab-IL15-Fc x Fab-Fc format, one preferred embodiment utilizes the skew variant pair S364K/E357Q:L368D/K370S.

[0546] In the Fab-IL15-Fc x Fab-Fc format, one preferred embodiment utilizes the ICOS ABD having the variable heavy and light domain pair of [ICOS]_H0 and [ICOS]L0 from FIG. 24; [ICOS]_H0.66 and [ICOS]_L0 from FIG. 24; Jmab-136[ICOS]vh and vl from FIG. 60; ICOS 314.8[ICOS]vh and vl from FIG. 60; H2L5[ICOS] vh and vl from FIG. 60; 37A10S713[ICOS] vh and vl from FIG. 60; C398.4A[ICOS] vh and vl from FIG. 60; ICOS.33[ICOS] vh and vl from FIG. 60; STIM001[ICOS] vh and vl from FIG. 60; or STIM003[ICOS] vh and vl from FIG. 60 and the skew variant pair S364K/E357Q:L368D/K370S.

[0547] In the Fab-IL15-Fc x Fab-Fc format, one preferred embodiment utilizes the ICOS ABD having the variable heavy and light domain pair of [ICOS]_H0 and [ICOS]L0 from FIG. 24; [ICOS]_H0.66 and [ICOS]_L0 from FIG. 24; Jmab-136[ICOS]vh and vl from FIG. 60; ICOS 314.8[ICOS]vh and vl from FIG. 60; H2L5[ICOS] vh and vl from FIG. 60; 37A10S713[ICOS] vh and vl from FIG. 60; C398.4A[ICOS] vh and vl from FIG. 60; ICOS.33[ICOS] vh and vl from FIG. 60; STIM001[ICOS] vh and vl from FIG. 60; or STIM003[ICOS] vh and vl from FIG. 60. with either the IL-15 N4D/N65D variant or the IL-15 D30N/N65D variant or the IL-15 D30N/E64Q/N65D variant.

[0548] In the Fab-IL15-Fc x Fab-Fc format, one preferred embodiment utilizes the ICOS ABD having the variable heavy and light domain pair of [ICOS]_H0 and [ICOS]L0 from FIG. 24; [ICOS]_H0.66 and [ICOS]_L0 from FIG. 24; Jmab-136[ICOS]vh and vl from FIG. 60; ICOS 314.8[ICOS]vh and vl from FIG. 60; H2L5[ICOS] vh and vl from FIG. 60; 37A10S713[ICOS] vh and vl from FIG. 60; C398.4A[ICOS] vh and vl from FIG. 60; ICOS.33[ICOS] vh and vl from FIG. 60; STIM001[ICOS] vh and vl from FIG. 60; or STIM003[ICOS] vh and vl from FIG. 60, the skew variants S364K/E357Q (on a first Fc-containing monomer) and L368D/K370S (on the second corresponding Fc-containing monomer), the pI variants Q295E/N384D/Q418E/N421D (on either the first or the second Fc-containing monomer; and further comprising N208D if said Fc-containing monomer comprises CH1), the ablation variants E233P/L234V/L235A/G236_/S267K on both Fc-containing monomers, and optionally the 428L/434S variants on both Fc-containing monomers.

[0549] Additional useful human ICOS antigen binding domains for use in this ICOS-targeted x IL-15/IL-15Rα Fc fusion protein format include, but are not limited to, those listed in FIGS. 24, 60, and 62-64 (e.g., SEQ ID NOs:140-143, 179-242, 315-584) and the sequence listing (e.g., SEQ ID NOs:585-802).

### IV. Particularly Useful Embodiments of the Invention

[0550] The present invention provides a ICOS-targeted IL-15/IL-15Rα heterodimeric fusion protein comprising at least two monomers, one of which contains an ICOS ABD and the other that contains an IL-15/RA complex, joined using heterodimeric Fc domains.

[0551] In some embodiments, the first and the second Fc domains have a set of amino acid substitutions selected from the group consisting of S267K/L368D/K370S:S267K/S364K/E357Q; S364K/E357Q:L368D/K370S; L368D/K370S:S364K; L368E/K370S:S364K; T411E/K360E/Q362E:D401K; L368D/K370S:S364K/E357L and K370S:S364K/E357Q, and T366S/L368A/Y407V:T366W (optionally including a bridging disulfide, T366S/L368A/Y407V/Y349C:T366W/S354C or T366S/L368A/Y407V/5354C:T366W:Y349C, according to EU numbering.

[0552] In some instances, the first and/or the second Fc domains have an additional set of amino acid substitutions comprising Q295E/N384D/Q418E/N421D, according to EU numbering. In some cases, the first and/or the second Fc domains have an additional set of amino acid substitutions consisting of G236R/L328R, E233P/L234V/L235A/G236del/S239K, E233P/L234V/L235A/G236del/S267K, E233P/L234V/L235A/G236del/S239K/A327G, E233P/L234V/L235A/G236del/S267K/A327G and E233P/L234V/L235A/G236del, according to EU numbering.

[0553] In some embodiments, the first and the second Fc domains have an amino acid substitution comprising M428L/N434S or M428L/N434A.

[0554] In some embodiments, the IL-15 protein has a polypeptide sequence selected from the group consisting of SEQ ID NO:1 (full-length human IL-15) and SEQ ID NO:2 (truncated human IL-15), and the IL-15Rα protein has a polypeptide sequence selected from the group consisting of SEQ ID NO:3 (full-length human IL-15Rα) and SEQ ID NO:4 (sushi domain of human IL-15Rα).

[0555] In some embodiments, the IL-15 protein and the IL-15Rα protein can have a set of amino acid substitutions selected from the group consisting of E87C:D96/P97/C98; E87C:D96/C97/A98; V49C:540C; L52C:540C; E89C:K34C; Q48C:G38C; E53C:L42C; C42S:A37C; and L45C:A37C, respectively.

[0556] In some embodiments, the IL-15 protein variant has amino acid substitutions selected from N4D/N65D, D30N/N65D, or D30N/E64Q/N65D.

[0557] In some embodiments, provided herein is a heterodimeric fusion protein of a scIL-15/Rα x Fab format comprising: (a) a first monomer comprising, from N- to C-terminal: i) an IL-15 sushi domain; ii) a first domain linker; iii) a variant IL-15 domain; iv) a second domain linker; v) a first variant Fc domain comprising CH2-CH3; and (b) a second monomer comprising a heavy chain comprising VH1-CH1-hinge-CH2-CH3, wherein the CH2-CH3 is a second variant Fc domain; and c) a light chain comprising VL-CL; wherein the VH1 and VL form an antigen binding domain that binds human ICOS.

[0558] In some embodiments, the ICOS antigen binding domain comprises an anti-ICOS scFv or an anti-ICOS Fab.

[0559] In some embodiments, the ICOS ABD having the variable heavy and light domain pair of [ICOS]_H0 and [ICOS]L0 from FIG. 24; [ICOS]_H0.66 and [ICOS]_L0 from FIG. 24; Jmab-136[ICOS]vh and vl from FIG. 60; ICOS 314.8[ICOS]vh and vl from FIG. 60; H2L5[ICOS] vh and vl from FIG. 60; 37A10S713[ICOS] vh and vl from FIG. 60; C398.4A[ICOS] vh and vl from FIG. 60; ICOS.33[ICOS] vh and vl from FIG. 60; STIM001[ICOS] vh and vl from FIG. 60; and STIM003[ICOS] vh and vl from FIG. 60.

[0560] In some embodiments, the ICOS ABD having the variable heavy and light domain pair of [ICOS]_H0 and [ICOS]L0 from FIG. 24; [ICOS]_H0.66 and [ICOS]_L0 from FIG. 24; Jmab-136[ICOS]vh and vl from FIG. 60; ICOS 314.8[ICOS]vh and vl from FIG. 60; H2L5[ICOS] vh and vl from FIG. 60; 37A10S713[ICOS] vh and vl from FIG. 60; C398.4A[ICOS] vh and vl from FIG. 60; ICOS.33[ICOS] vh and vl from FIG. 60; STIM001[ICOS] vh and vl from FIG. 60; and STIM003[ICOS] vh and vl from FIG. 60, with either the IL-15 N4D/N65D variant or the IL-15 D30N/N65D variant or the IL-15 D30N/E64Q/N65D variant.

[0561] In preferred embodiments, the ICOS-targeted x IL-15/RA Fc fusion protein of the present disclosure has a scIL-15/Rα x Fab format. In some cases, the IL-15Rα(sushi) domain is fused to the N-terminus of the IL-15 variant by a linker and the C-terminus of the IL-15 variant is fused to the N-terminus of one side of a heterodimeric Fc-region. The heterodimeric Fc-region includes a variable heavy chain fused to the other side of the heterodimeric Fc. The corresponding variable light chain forms a Fab with the variable heavy chain.

[0562] In some embodiments, the ICOS-targeted IL-15/RA-Fc fusion protein is XENP29975, XENP29978, XENP30810, XENP30811, XENP30812, or XENP30813.

[0563] In some embodiments, the ICOS-targeted IL-15/RA-Fc fusion protein is depicted in FIGS. 26A-26D.

[0564] In some embodiments, the ICOS-targeted IL-15/RA-Fc fusion protein is depicted in FIGS. 61A-61P.

### V. Nucleic Acids of the Invention

[0565] The invention further provides nucleic acid compositions encoding the targeted heterodimeric fusion proteins of the invention (or, in the case of a monomer Fc domain protein, nucleic acids encoding those as well).

[0566] As will be appreciated by those in the art, the nucleic acid compositions will depend on the format of the targeted heterodimeric fusion protein. Thus, for example, when the format requires three amino acid sequences, three nucleic acid sequences can be incorporated into one or more expression vectors for expression. In any embodiments, each of the three coding nucleic acid sequences are incorporated into different expression vectors. Similarly, some formats only two nucleic acids are needed; again, they can be put into one or two expression vectors, or four or 5. As noted herein, some constructs have two copies of a light chain, for example.

[0567] As is known in the art, the nucleic acids encoding the components of the invention can be incorporated into expression vectors as is known in the art, and depending on the host cells used to produce the targeted heterodimeric fusion proteins of the invention. Generally, the nucleic acids are operably linked to any number of regulatory elements (promoters, origin of replication, selectable markers, ribosomal binding sites, inducers, etc.). The expression vectors can be extra-chromosomal or integrating vectors.

[0568] The nucleic acids and/or expression vectors of the invention are then transformed into any number of different types of host cells as is well known in the art, including mammalian, bacterial, yeast, insect and/or fungal cells, with mammalian cells (e.g. CHO cells), finding use in many embodiments.

[0569] In some embodiments, nucleic acids encoding each monomer, as applicable depending on the format, are each contained within a single expression vector, generally under different or the same promoter controls. In embodiments of particular use in the present invention, each of these two or three nucleic acids are contained on a different expression vector.

[0570] The targeted heterodimeric fusion proteins of the invention are made by culturing host cells comprising the expression vector(s) as is well known in the art. Once produced, traditional fusion protein or antibody purification steps are done, including an ion exchange chromatography step. As discussed herein, having the pIs of the two monomers differ by at least 0.5 can allow separation by ion exchange chromatography or isoelectric focusing, or other methods sensitive to isoelectric point. That is, the inclusion of pI substitutions that alter the isoelectric point (pI) of each monomer so that such that each monomer has a different pI and the heterodimer also has a distinct pI, thus facilitating isoelectric purification of the heterodimer (e.g., anionic exchange columns, cationic exchange columns). These substitutions also aid in the determination and monitoring of any contaminating homodimers post-purification (e.g., IEF gels, cIEF, and analytical IEX columns).

### VI. Biological and Biochemical Functionality of Targeted ICOS Antibody x IL-15/IL-15Rα Heterodimeric Immunomodulatory Fusion Proteins

[0571] Generally, the targeted heterodimeric fusion proteins of the invention are administered to patients with cancer, and efficacy is assessed, in a number of ways as described herein. Thus, while standard assays of efficacy can be run, such as cancer load, size of tumor, evaluation of presence or extent of metastasis, etc., immuno-oncology treatments can be assessed on the basis of immune status evaluations as well. This can be done in a number of ways, including both in vitro and in vivo assays. For example, evaluation of changes in immune status along with “old fashioned” measurements such as tumor burden, size, invasiveness, LN involvement, metastasis, etc. can be done. Thus, any or all of the following can be evaluated: the inhibitory effects of the heterodimeric fusion proteins on CD4⁺ T cell activation or proliferation, CD8⁺ T (CTL) cell activation or proliferation, CD8⁺ T cell-mediated cytotoxic activity and/or CTL mediated cell depletion, NK cell activity and NK mediated cell depletion, the potentiating effects of the heterodimeric fusion protein on Treg cell differentiation and proliferation and Treg- or myeloid derived suppressor cell (MDSC)-mediated immunosuppression or immune tolerance, and/or the effects of heterodimeric fusion protein on proinflammatory cytokine production by immune cells, e.g., IL-2, IFN-γ or TNF-α production by T or other immune cells.

[0572] In some embodiments, assessment of treatment is done by evaluating immune cell proliferation, using for example, CFSE dilution method, Ki67 intracellular staining of immune effector cells, and ³H-thymidine incorporation method.

[0573] In some embodiments, assessment of treatment is done by evaluating the increase in gene expression or increased protein levels of activation-associated markers, including one or more of: CD25, CD69, CD137, ICOS, PD1, GITR, OX40, and cell degranulation measured by surface expression of CD107A.

[0574] In general, gene expression assays are done as is known in the art.

[0575] In general, protein expression measurements are also similarly done as is known in the art.

[0576] In some embodiments, assessment of treatment is done by assessing cytotoxic activity measured by target cell viability detection via estimating numerous cell parameters such as enzyme activity (including protease activity), cell membrane permeability, cell adherence, ATP production, co-enzyme production, and nucleotide uptake activity. Specific examples of these assays include, but are not limited to, Trypan Blue or PI staining, ⁵¹Cr or 35S release method, LDH activity, MTT and/or WST assays, Calcein-AM assay, Luminescent based assay, and others.

[0577] In some embodiments, assessment of treatment is done by assessing T cell activity measured by cytokine production, measure either intracellularly in culture supernatant using cytokines including, but not limited to, IFNγ, TNFα, GM-CSF, IL2, IL6, IL4, IL5, IL10, IL13 using well known techniques.

[0578] Accordingly, assessment of treatment can be done using assays that evaluate one or more of the following: (i) increases in immune response, (ii) increases in activation of αβ and/or γδ T cells, (iii) increases in cytotoxic T cell activity, (iv) increases in NK and/or NKT cell activity, (v) alleviation of αβ and/or γδ T-cell suppression, (vi) increases in pro-inflammatory cytokine secretion, (vii) increases in IL-2 secretion; (viii) increases in interferon-γ production, (ix) increases in Th1 response, (x) decreases in Th2 response, (xi) decreases or eliminates cell number and/or activity of at least one of regulatory T cells (Tregs).

[0579] A. Assays to Measure Efficacy

[0580] In some embodiments, T cell activation is assessed using a Mixed Lymphocyte Reaction (MLR) assay as is known in the art. An increase in activity indicates immunostimulatory activity. Appropriate increases in activity are outlined below.

[0581] In one embodiment, the signaling pathway assay measures increases or decreases in immune response as measured for an example by phosphorylation or de-phosphorylation of different factors, or by measuring other post translational modifications. An increase in activity indicates immunostimulatory activity. Appropriate increases in activity are outlined below.

[0582] In one embodiment, the signaling pathway assay measures increases or decreases in activation of αβ and/or γδ T cells as measured for an example by cytokine secretion or by proliferation or by changes in expression of activation markers like for an example CD137, CD107a, PD1, etc. An increase in activity indicates immunostimulatory activity. Appropriate increases in activity are outlined below.

[0583] In one embodiment, the signaling pathway assay measures increases or decreases in cytotoxic T cell activity as measured for an example by direct killing of target cells like for an example cancer cells or by cytokine secretion or by proliferation or by changes in expression of activation markers like for an example CD137, CD107a, PD1, etc. An increase in activity indicates immunostimulatory activity. Appropriate increases in activity are outlined below.

[0584] In one embodiment, the signaling pathway assay measures increases or decreases in NK and/or NKT cell activity as measured for an example by direct killing of target cells like for an example cancer cells or by cytokine secretion or by changes in expression of activation markers like for an example CD107a, etc. An increase in activity indicates immunostimulatory activity. Appropriate increases in activity are outlined below.

[0585] In one embodiment, the signaling pathway assay measures increases or decreases in αβ and/or γδ T-cell suppression, as measured for an example by cytokine secretion or by proliferation or by changes in expression of activation markers like for an example CD137, CD107a, PD1, etc. An increase in activity indicates immunostimulatory activity. Appropriate increases in activity are outlined below.

[0586] In one embodiment, the signaling pathway assay measures increases or decreases in pro-inflammatory cytokine secretion as measured for example by ELISA or by Luminex or by Multiplex bead based methods or by intracellular staining and FACS analysis or by Alispot etc. An increase in activity indicates immunostimulatory activity. Appropriate increases in activity are outlined below.

[0587] In one embodiment, the signaling pathway assay measures increases or decreases in IL-2 secretion as measured for example by ELISA or by Luminex or by Multiplex bead based methods or by intracellular staining and FACS analysis or by Alispot etc. An increase in activity indicates immunostimulatory activity. Appropriate increases in activity are outlined below.

[0588] In one embodiment, the signaling pathway assay measures increases or decreases in interferon-γ production as measured for example by ELISA or by Luminex or by Multiplex bead based methods or by intracellular staining and FACS analysis or by Alispot etc. An increase in activity indicates immunostimulatory activity. Appropriate increases in activity are outlined below.

[0589] In one embodiment, the signaling pathway assay measures increases or decreases in Th1 response as measured for an example by cytokine secretion or by changes in expression of activation markers. An increase in activity indicates immunostimulatory activity. Appropriate increases in activity are outlined below.

[0590] In one embodiment, the signaling pathway assay measures increases or decreases in Th2 response as measured for an example by cytokine secretion or by changes in expression of activation markers. An increase in activity indicates immunostimulatory activity. Appropriate increases in activity are outlined below.

[0591] In one embodiment, the signaling pathway assay measures increases or decreases cell number and/or activity of at least one of regulatory T cells (Tregs), as measured for example by flow cytometry or by IHC. A decrease in response indicates immunostimulatory activity. Appropriate decreases are the same as for increases, outlined below.

[0592] In one embodiment, the signaling pathway assay measures increases or decreases in M2 macrophages cell numbers, as measured for example by flow cytometry or by IHC. A decrease in response indicates immunostimulatory activity. Appropriate decreases are the same as for increases, outlined below.

[0593] In one embodiment, the signaling pathway assay measures increases or decreases in M2 macrophage pro-tumorigenic activity, as measured for an example by cytokine secretion or by changes in expression of activation markers. A decrease in response indicates immunostimulatory activity. Appropriate decreases are the same as for increases, outlined below.

[0594] In one embodiment, the signaling pathway assay measures increases or decreases in N2 neutrophils increase, as measured for example by flow cytometry or by IHC. A decrease in response indicates immunostimulatory activity. Appropriate decreases are the same as for increases, outlined below.

[0595] In one embodiment, the signaling pathway assay measures increases or decreases in N2 neutrophils pro-tumorigenic activity, as measured for an example by cytokine secretion or by changes in expression of activation markers. A decrease in response indicates immunostimulatory activity. Appropriate decreases are the same as for increases, outlined below.

[0596] In one embodiment, the signaling pathway assay measures increases or decreases in inhibition of T cell activation, as measured for an example by cytokine secretion or by proliferation or by changes in expression of activation markers like for an example CD137, CD107a, PD1, etc. An increase in activity indicates immunostimulatory activity. Appropriate increases in activity are outlined below.

[0597] In one embodiment, the signaling pathway assay measures increases or decreases in inhibition of CTL activation as measured for an example by direct killing of target cells like for an example cancer cells or by cytokine secretion or by proliferation or by changes in expression of activation markers like for an example CD137, CD107a, PD1, etc. An increase in activity indicates immunostimulatory activity. Appropriate increases in activity are outlined below.

[0598] In one embodiment, the signaling pathway assay measures increases or decreases in αβ and/or γδ T cell exhaustion as measured for an example by changes in expression of activation markers. A decrease in response indicates immunostimulatory activity. Appropriate decreases are the same as for increases, outlined below.

[0599] In one embodiment, the signaling pathway assay measures increases or decreases αβ and/or γδ T cell response as measured for an example by cytokine secretion or by proliferation or by changes in expression of activation markers like for an example CD137, CD107a, PD1, etc. An increase in activity indicates immunostimulatory activity. Appropriate increases in activity are outlined below.

[0600] In one embodiment, the signaling pathway assay measures increases or decreases in stimulation of antigen-specific memory responses as measured for an example by cytokine secretion or by proliferation or by changes in expression of activation markers like for an example CD45RA, CCR7 etc. An increase in activity indicates immunostimulatory activity. Appropriate increases in activity are outlined below.

[0601] In one embodiment, the signaling pathway assay measures increases or decreases in apoptosis or lysis of cancer cells as measured for an example by cytotoxicity assays such as for an example MTT, Cr release, Calcine AM, or by flow cytometry based assays like for an example CFSE dilution or propidium iodide staining etc. An increase in activity indicates immunostimulatory activity. Appropriate increases in activity are outlined below.

[0602] In one embodiment, the signaling pathway assay measures increases or decreases in stimulation of cytotoxic or cytostatic effect on cancer cells. as measured for an example by cytotoxicity assays such as for an example MTT, Cr release, Calcine AM, or by flow cytometry based assays like for an example CFSE dilution or propidium iodide staining etc. An increase in activity indicates immunostimulatory activity. Appropriate increases in activity are outlined below.

[0603] In one embodiment, the signaling pathway assay measures increases or decreases direct killing of cancer cells as measured for an example by cytotoxicity assays such as for an example MTT, Cr release, Calcine AM, or by flow cytometry based assays like for an example CFSE dilution or propidium iodide staining etc. An increase in activity indicates immunostimulatory activity. Appropriate increases in activity are outlined below.

[0604] In one embodiment, the signaling pathway assay measures increases or decreases Th17 activity as measured for an example by cytokine secretion or by proliferation or by changes in expression of activation markers. An increase in activity indicates immunostimulatory activity. Appropriate increases in activity are outlined below.

[0605] In one embodiment, the signaling pathway assay measures increases or decreases in induction of complement dependent cytotoxicity and/or antibody dependent cell-mediated cytotoxicity, as measured for an example by cytotoxicity assays such as for an example MTT, Cr release, Calcine AM, or by flow cytometry based assays like for an example CFSE dilution or propidium iodide staining etc. An increase in activity indicates immunostimulatory activity. Appropriate increases in activity are outlined below.

[0606] In one embodiment, T cell activation is measured for an example by direct killing of target cells like for an example cancer cells or by cytokine secretion or by proliferation or by changes in expression of activation markers like for an example CD137, CD107a, PD1, etc. For T-cells, increases in proliferation, cell surface markers of activation (e.g. CD25, CD69, CD137, PD1), cytotoxicity (ability to kill target cells), and cytokine production (e.g. IL-2, IL-4, IL-6, IFNγ, TNF-a, IL-10, IL-17A) would be indicative of immune modulation that would be consistent with enhanced killing of cancer cells.

[0607] In one embodiment, NK cell activation is measured for example by direct killing of target cells like for an example cancer cells or by cytokine secretion or by changes in expression of activation markers like for an example CD107a, etc. For NK cells, increases in proliferation, cytotoxicity (ability to kill target cells and increases CD107a, granzyme, and perforin expression), cytokine production (e.g. IFNγ and TNF), and cell surface receptor expression (e.g. CD25) would be indicative of immune modulation that would be consistent with enhanced killing of cancer cells.

[0608] In one embodiment, γδ T cell activation is measured for example by cytokine secretion or by proliferation or by changes in expression of activation markers.

[0609] In one embodiment, Th1 cell activation is measured for example by cytokine secretion or by changes in expression of activation markers.

[0610] Appropriate increases in activity or response (or decreases, as appropriate as outlined above), are increases of 10%, 20%, 30%, 40%, 50%, 60%, 70%, 80%, 90%, 95% or 98 to 99% percent over the signal in either a reference sample or in control samples, for example test samples that do not contain a heterodimeric fusion protein of the invention. Similarly, increases of at least one-, two-, three-, four- or five-fold as compared to reference or control samples show efficacy.

### VII. Treatments

[0611] Once made, the compositions of the invention find use in a number of oncology applications, by treating cancer, generally by promoting T cell activation (e.g., T cells are no longer suppressed) with the binding of the heterodimeric Fc fusion proteins of the invention.

[0612] Accordingly, the targeted heterodimeric compositions of the invention find use in the treatment of these cancers.

[0613] A. Targeted Heterodimeric Fusion Protein Compositions for In Vivo Administration

[0614] Formulations of the antibodies used in accordance with the present invention are prepared for storage by mixing an antibody having the desired degree of purity with optional pharmaceutically acceptable carriers, excipients or stabilizers (as generally outlined in Remington's Pharmaceutical Sciences 16th edition, Osol, A. Ed. [1980]), in the form of lyophilized formulations or aqueous solutions. Acceptable carriers, buffers, excipients, or stabilizers are nontoxic to recipients at the dosages and concentrations employed, and include buffers such as phosphate, citrate, and other organic acids; antioxidants including ascorbic acid and methionine; preservatives (such as octadecyldimethylbenzyl ammonium chloride; hexamethonium chloride; benzalkonium chloride, benzethonium chloride; phenol, butyl or benzyl alcohol; alkyl parabens such as methyl or propyl paraben; catechol; resorcinol; cyclohexanol; 3-pentanol; and m-cresol); low molecular weight (less than about 10 residues) polypeptides; proteins, such as serum albumin, gelatin, or immunoglobulins; hydrophilic polymers such as polyvinylpyrrolidone; amino acids such as glycine, glutamine, asparagine, histidine, arginine, or lysine; monosaccharides, disaccharides, and other carbohydrates including glucose, mannose, or dextrins; chelating agents such as EDTA; sugars such as sucrose, mannitol, trehalose or sorbitol; salt-forming counter-ions such as sodium; metal complexes (e.g., Zn-protein complexes); and/or non-ionic surfactants such as TWEEN™, PLURONICS™ or polyethylene glycol (PEG).

[0615] B. Combination Therapies

[0616] In some embodiments, the heterodimeric fusion proteins of the invention can be used in combination therapies with antibodies that bind to different checkpoint proteins, e.g. not ICOS antibodies. In this way, the antigen binding domains of the additional antibody do not compete for binding with the targeted heterodimeric fusion protein. In this way, a sort of “triple combination” therapy is achieved, as three receptors are engaged (two from the targeted heterodimeric fusion protein and one from the additional antibody). As discussed herein, the heterodimeric fusion protein can have different valencies and specificities as outlined herein.

[0617] Surprisingly, as shown herein, these combinations can result in synergistic effects when co-administered. In this context, “co-administration” means that the two moieties can be administered simultaneously or sequentially. That is, in some cases, the drugs may be administered simultaneously, although generally this is through the use of two separate IV infusions; that is, the drugs are generally not combined into a single dosage unit. Alternatively, co-administration includes the sequential administration of the two separate drugs, either in a single day or separate days (including separate days over time).

[0618] 1. Anti-PD-1 Antibodies for Use in Co-Administration Therapies

[0619] As is known in the art, there are two currently approved anti-PD-1 antibodies and many more in clinical testing. Thus, suitable anti-PD-1 antibodies for use in combination therapies as outlined herein include, but are not limited to, the two currently FDA approved antibodies, pembrolizumab and nivolizumab, as well as those in clinical testing currently, including, but not limited to, tislelizumab, Sym021, REGN2810 (developed by Rengeneron), JNJ-63723283 (developed by J and J), SHR-1210, pidilizumab, AMP-224, MEDIo680, PDR001 and CT-001, as well as others outlined in Liu et al., J. Hemat. & Oncol. (2017), 10:136, the antibodies therein expressly incorporated by reference. As above, anti-PD-1 antibodies are used in combination when the targeted IL-15/IL-15Rα-Fc fusion protein of the invention do not have an antigen binding domain that binds PD-1.

[0620] 2. Anti-PD-L1 Antibodies for Use in Co-Administration Therapies

[0621] In some embodiments, anti-PD-L1 antibodies are used in combination. As is known in the art, there are three currently approved anti-PD-L1 antibodies and many more in clinical testing. Thus, suitable anti-PD-L1 antibodies for use in combination therapies as outlined herein include, but are not limited to, the three currently FDA approved antibodies, atezolizumab, avelumab, durvalumab, as well as those in clinical testing currently, including, but not limited to, LY33000054 and CS1001, as well as others outlined in Liu et al., J. Hemat. & Oncol. (2017), 10:136, the antibodies therein expressly incorporated by reference. As above, anti-PD-L1 antibodies are used in combination when the targeted IL-15/IL-15Rα-Fc fusion protein of the invention do not have an antigen binding domain that binds PD-L1.

[0622] 3. Anti-TIM-3 Antibodies for Use in Co-Administration Therapies

[0623] In some embodiments, anti-TIM-3 antibodies can be used in combination with the targeted IL-15/IL-15Rα-Fc fusion proteins of the invention. There are several TIM-3 antibodies in clinical development, including MBG453 and TSR-022. As above, anti-TIM-3 antibodies are used in combination when the targeted IL-15/IL-15Rα-Fc fusion protein of the invention do not have an antigen binding domain that binds TIM-3.

[0624] 4. Anti-LAG-3 Antibodies for Use in Co-Administration Therapies

[0625] In some embodiments, anti-LAG-3 antibodies can be used in combination with the targeted IL-15/IL-15Rα-Fc fusion proteins of the invention. There are several LAG-3 antibodies in clinical development including BMS-986016, LAG525 and REGN3767. As above, anti-LAG-3 antibodies are used in combination when the targeted IL-15/IL-15Rα-Fc fusion protein of the invention do not have an antigen binding domain that binds LAG-3.

[0626] 5. Anti-CTLA-4 Antibodies for Use in Co-Administration Therapies

[0627] In some embodiments, anti-CTLA-4 antibodies can be used in combination with the targeted IL-15/IL-15Rα-Fc fusion protein of the invention. Ipilimumab has been approved, and there are several more in development, including CP-675,206 and AGEN-1884. As above, anti-CTLA-4 antibodies are used in combination when the targeted IL-15/IL-15Rα-Fc fusion protein of the present invention do not have an antigen binding domain that binds CTLA-4.

[0628] 6. Anti-TIGIT Antibodies for Use in Co-Administration Therapies

[0629] In some embodiments, anti-TIGIT antibodies can be used in combination with the targeted IL-15/IL-15Rα-Fc fusion proteins of the invention.

[0630] C. Administrative Modalities

[0631] The targeted heterodimeric fusion proteins and chemotherapeutic agents of the invention are administered to a subject, in accord with known methods, such as intravenous administration as a bolus or by continuous infusion over a period of time.

[0632] D. Treatment Modalities

[0633] In the methods of the invention, therapy is used to provide a positive therapeutic response with respect to a disease or condition. By “positive therapeutic response” is intended an improvement in the disease or condition, and/or an improvement in the symptoms associated with the disease or condition. For example, a positive therapeutic response would refer to one or more of the following improvements in the disease: (1) a reduction in the number of neoplastic cells; (2) an increase in neoplastic cell death; (3) inhibition of neoplastic cell survival; (5) inhibition (i.e., slowing to some extent, preferably halting) of tumor growth; (6) an increased patient survival rate; and (7) some relief from one or more symptoms associated with the disease or condition.

[0634] Positive therapeutic responses in any given disease or condition can be determined by standardized response criteria specific to that disease or condition. Tumor response can be assessed for changes in tumor morphology (i.e., overall tumor burden, tumor size, and the like) using screening techniques such as magnetic resonance imaging (MM) scan, x-radiographic imaging, computed tomographic (CT) scan, bone scan imaging, endoscopy, and tumor biopsy sampling including bone marrow aspiration (BMA) and counting of tumor cells in the circulation.

[0635] In addition to these positive therapeutic responses, the subject undergoing therapy may experience the beneficial effect of an improvement in the symptoms associated with the disease.

[0636] Treatment according to the present invention includes a “therapeutically effective amount” of the medicaments used. A “therapeutically effective amount” refers to an amount effective, at dosages and for periods of time necessary, to achieve a desired therapeutic result.

[0637] A therapeutically effective amount may vary according to factors such as the disease state, age, sex, and weight of the individual, and the ability of the medicaments to elicit a desired response in the individual. A therapeutically effective amount is also one in which any toxic or detrimental effects of the antibody or antibody portion are outweighed by the therapeutically beneficial effects.

[0638] A “therapeutically effective amount” for tumor therapy may also be measured by its ability to stabilize the progression of disease. The ability of a compound to inhibit cancer may be evaluated in an animal model system predictive of efficacy in human tumors.

[0639] Alternatively, this property of a composition may be evaluated by examining the ability of the compound to inhibit cell growth or to induce apoptosis by in vitro assays known to the skilled practitioner. A therapeutically effective amount of a therapeutic compound may decrease tumor size, or otherwise ameliorate symptoms in a subject. One of ordinary skill in the art would be able to determine such amounts based on such factors as the subject's size, the severity of the subject's symptoms, and the particular composition or route of administration selected.

[0640] Dosage regimens are adjusted to provide the optimum desired response (e.g., a therapeutic response). For example, a single bolus may be administered, several divided doses may be administered over time or the dose may be proportionally reduced or increased as indicated by the exigencies of the therapeutic situation. Parenteral compositions may be formulated in dosage unit form for ease of administration and uniformity of dosage. Dosage unit form as used herein refers to physically discrete units suited as unitary dosages for the subjects to be treated; each unit contains a predetermined quantity of active compound calculated to produce the desired therapeutic effect in association with the required pharmaceutical carrier.

[0641] The specification for the dosage unit forms of the present invention are dictated by and directly dependent on (a) the unique characteristics of the active compound and the particular therapeutic effect to be achieved, and (b) the limitations inherent in the art of compounding such an active compound for the treatment of sensitivity in individuals.

[0642] The efficient dosages and the dosage regimens for the targeted heterodimeric fusion protein used in the present invention depend on the disease or condition to be treated and may be determined by the persons skilled in the art.

[0643] An exemplary, non-limiting range for a therapeutically effective amount of a targeted heterodimeric fusion protein used in the present invention is about 0.1-100 mg/kg.

[0644] All cited references are herein expressly incorporated by reference in their entirety.

[0645] Whereas particular embodiments of the invention have been described above for purposes of illustration, it will be appreciated by those skilled in the art that numerous variations of the details may be made without departing from the invention as described in the appended claims.

### VIII. Examples

[0646] Examples are provided below to illustrate the present invention. These examples are not meant to constrain the present invention to any particular application or theory of operation. For all constant region positions discussed in the present invention, numbering is according to the EU index as in Kabat (Kabat et al., 1991, Sequences of Proteins of Immunological Interest, 5th Ed., United States Public Health Service, National Institutes of Health, Bethesda, entirely incorporated by reference). Those skilled in the art of antibodies will appreciate that this convention consists of nonsequential numbering in specific regions of an immunoglobulin sequence, enabling a normalized reference to conserved positions in immunoglobulin families. Accordingly, the positions of any given immunoglobulin as defined by the EU index will not necessarily correspond to its sequential sequence.

[0647] General and specific scientific techniques are outlined in US Patent Publications 2015/0307629, 2014/0288275 and WO2014/145806, all of which are expressly incorporated by reference in their entirety and particularly for the techniques outlined therein. Examples 1 and 2 from U.S. Ser. No. 62/416,087, filed on Nov. 1, 2016 are expressly incorporated by reference in their entirety, including the corresponding figures. Additionally, U.S. Ser. Nos. 62/408,655, 62/443,465, 62/477,926, 15/785,401, 62/416,087 and 15/785,393 are expressly incorporated by reference in their entirety, and specifically for all the sequences, Figures and Legends therein.

### A. Example 1: IL-15/Rα-Fc

[0648] 1. 1A: Engineering IL-15/Rα-Fc Fusion Proteins

[0649] In order to address the short half-life of IL-15/IL-15Rα heterodimers, we generated the IL-15/IL-15Rα(sushi) complex as an Fc fusion (herein, collectively referred to as IL-15/Rα-Fc fusion proteins) with the goal of facilitating production and promoting FcRn-mediated recycling of the complex and prolonging half-life.

[0650] Plasmids coding for IL-15 or IL-15Rα sushi domain were constructed by standard gene synthesis, followed by subcloning into a pTT5 expression vector containing Fc fusion partners (e.g., constant regions as depicted in FIG. 11). Cartoon schematics of illustrative IL-15/Rα-Fc fusion protein formats are depicted in FIGS. 14A-G.

[0651] An illustrative protein of the IL-15/Rα-heteroFc format (FIG. 14A) is XENP20818, sequences for which are depicted in FIG. 15, with sequences for additional proteins of this format. An illustrative proteins of the scIL-15/Rα-Fc format (FIG. 14B) is XENP21478, sequences for which are depicted in FIG. 16. An illustrative proteins of the ncIL-15/Rα-Fc format (FIG. 14C) is XENP21479, sequences for which are depicted in FIG. 17.

[0652] Proteins were produced by transient transfection in HEK293E cells and were purified by a two-step purification process comprising protein A chromatography and ion exchange chromatography.

[0653] Illustrative IL-15/Rα-Fc fusion proteins in the scIL-15/Rα-Fc format (XENP21478) and in the ncIL-15/Rα-Fc format (XENP21479) were tested in a cell proliferation assay. Human PBMCs were treated with the test articles at the indicated concentrations. 4 days after treatment, the PBMCs were stained with anti-CD8-FITC (RPA-T8), anti-CD4-PerCP/Cy5.5 (OKT4), anti-CD27-PE (M-T271), anti-CD56-BV421 (5.1H11), anti-CD16-BV421 (3G8), and anti-CD45RA-BV605 (Hi100) to gate for the following cell types: CD4+ T cells, CD8+ T cells, and NK cells (CD56+/CD16+). Ki67 is a protein strictly associated with cell proliferation, and staining for intracellular Ki67 was performed using anti-Ki67-APC (Ki-67) and Foxp3/Transcription Factor Staining Buffer Set (Thermo Fisher Scientific, Waltham, Mass.). The percentage of Ki67 on the above cell types was measured using FACS (depicted in FIGS. 18A-C). The data show that the illustrative IL-15/Rα-Fc fusion proteins induced strong proliferation of CD8+ T cells and NK cells.

[0654] 2. 1B:IL-15/Rα-Fc Fusion Proteins Engineered for Lower Potency

[0655] In order to further improve PK and prolong half-life, we reasoned that decreasing the potency of IL-15/Rα-Fc fusions would decrease the antigen sink, and thus, increase circulating half-life. By examining the crystal structure of the IL-15:IL-2Rβ and IL-15:common gamma chain interfaces, as well as by modeling using MOE software, we predicted residues at these interfaces that may be substituted in order to reduce potency. FIG. 19 depicts a structural model of the IL-15:receptor complexes showing locations of the predicted residues where we engineered isosteric substitutions (in order to reduce the risk of immunogenicity). Sequences for illustrative IL-15 variants engineered with the aim to reduce potency are depicted in FIG. 20.

[0656] Plasmids coding for IL-15 or IL-15Rα(sushi) were constructed by standard gene synthesis, followed by subcloning into a pTT5 expression vector containing Fc fusion partners (e.g., constant regions as depicted in FIG. 11). Substitutions identified as described above were incorporated by standard mutagenesis techniques. Sequences for illustrative IL-15/Rα-Fc fusion proteins of the “scIL-15/Rα-Fc” format engineered for reduced potency are depicted in FIG. 21 Proteins were produced and purified as generally described in Example 1A.

[0657] a. 1B(a): In Vitro Activity of scIL-15/Rα-Fc Fusion Proteins Comprising IL-15 Variants Engineered for Decreased Potency

[0658] Illustrative scIL-15/Rα-Fc fusion proteins comprising IL-15 variants were tested in cell proliferation assays. Human PBMCs were incubated with the indicated test articles at the indicated concentrations for 3 days. Following incubation, the PBMCs were stained with anti-CD3-PE (OKT3), anti-CD4-FITC (RPA-T4), anti-CD8-eF660 (SIDI8BEE), anti-CD16-BV421 (3G8), anti-CD45RA-APC/Fire750 (HI100), anti-CD56-BV605 (5.1H11), and anti-Ki67-PE/Cy7 (Ki-67) and analyzed by flow cytometry. FIG. 22 depicts the percentage of various lymphocyte populations expressing Ki67 indicative of proliferation.

[0659] The data show that several of the illustrative scIL-15/Rα-Fc fusions comprising IL-15 variants engineered with the aim to reduce potency did demonstrate reduced potency relative to scIL-15/Rα-Fc fusions comprising WT IL-15. Notably, the data show that scIL-15/Rα-Fc fusions comprising IL-15(D30N/E64Q/N65D) variant had drastically reduced activity in proliferation of various lymphocyte populations in the context of scIL-15/Rα-Fc fusions, in comparison to scIL-15/Rα-Fc fusions comprising IL-15(N4D/N65D) or IL-15(D30N/N65D) variants. On the other hand, scIL-15/Rα-Fc fusion comprising IL-15(D30N) variant had little to no reduction in potency relative to scIL-15/Rα-Fc fusion comprising WT IL-15.

### B. Example 2: ICOS-Targeted IL-15/Rα-Fc Fusions

[0660] Here, we describe the generation and characterization of IL-15/Rα-Fc fusions targeted to ICOS, collectively referred to herein as ICOS-targeted IL-15/Rα-Fc fusions.

[0661] 1. 2A: Engineering ICOS-Targeted IL-15/Rα-Fc Fusions

[0662] Plasmids coding for IL-15, IL-15Rα sushi domain, or the anti-ICOS variable regions were constructed by standard gene synthesis, followed by subcloning into a pTT5 expression vector containing Fc fusion partners (e.g., constant regions as depicted in FIG. 12). Cartoon schematics of illustrative ICOS-targeted IL-15/Rα-Fc fusions are depicted in FIG. 25.

[0663] A particular illustrative format, the “scIL-15/Rα x Fab” format (FIG. 25C), comprises IL-15Rα(sushi) fused to IL-15 by a variable length linker (termed “scIL-15/Rα”) which is then fused to the N-terminus of a heterodimeric Fc-region, with a variable heavy chain (VH) fused to the other side of the heterodimeric Fc, while a corresponding light chain is transfected separately so as to form a Fab with the VH.

[0664] We generated ICOS-targeted IL-15/Rα-Fc fusions in this format with illustrative anti-ICOS variable regions as depicted in FIG. 24, and the IL-15(N4D/N65D) variant. Sequences for XENP29975, an illustrative ICOS-targeted IL-15/Rα-Fc fusion protein with IL-15(N4D/N65D) variant as such (and Xtend analog XENP30811), are depicted in FIG. 26, with additional sequences depicted in FIG. 61 (based on additional anti-ICOS variable regions depicted in FIG. 60). We also generated a control RSV-targeted IL-15/Rα-Fc fusion protein XENP26007 with IL-15(N4D/N65D) variant, sequences for which are depicted in FIG. 27.

[0665] Proteins were produced by transient transfection in HEK293E cells and were purified by a two-step purification process comprising protein A chromatography and ion exchange chromatography.

[0666] 2. 2B: ICOS-Targeted IL-15/Rα-Fc Fusions are Active In Vitro

[0667] Human PBMCs (from 2 donors in two separate experiments) were stimulated for 48 hours with 500 ng/ml plate-bound anti-CD3 (OKT3) and then labeled with CFSE and incubated with the following test articles for 4 days at 37° C.: XENP29975 (ICOS-targeted IL-15/Rα-Fc fusion having N4D/N65D IL-15 variant); XENP24306 (control untargeted IL-15/Rα-Fc fusion having D30N/E64Q/N65D IL-15 variant); and XENP26007 (control RSV-targeted IL-15/Rα-Fc fusion having N4D/N65D IL-15 variant). Cells were stained with the following antibodies: anti-CD8-PerCP-By5.5 (SK1), anti-CD3-PE-Cy7 (OKT3), anti-PD-1-Alexa647 (XENP164352, sequences depicted in FIG. X, stained with Alexa Fluor™ 647 Antibody Labeling Kit), anti-CD45RO-APC-Fire750 (UCHL1), anti-HLA-DR-Alexa700 (L243), anti-CD107a-BV421 (H4A3), anti-CD16-BV605 (3G6), anti-CD56-BV605 (HCD56), anti-CD25-BV711 (M-A251), anti-CD45RA-BV785 (M-A251), anti-CD4-BUV395 (SK3), and Zombie Aqua (BV510), and analyzed by flow cytometry for various cell populations.

[0668] We investigated the proliferation of various T cell populations based on CFSE dilution (Zombie Aqua to exclude dead cells), data for which are depicted in FIGS. 28-36. While there are some variability between donors, the data generally suggests that ICOS-targeted IL-15/Rα-Fc fusions are much more potent in inducing proliferation of both CD8⁺ and CD4⁺ T cells in comparison to untargeted IL-15/Rα-Fc fusion (as well as control RSV-targeted IL-15/Rα-Fc fusion). Additionally, as shown in FIG. 37-38, ICOS-targeted IL-15/Rα-Fc fusions are much less potent in inducing proliferation of NK cells.

[0669] We also investigate the activation of various T cell populations based on expression of CD25 (a late stage T cell activation marker), data for which are depicted in FIGS. 39-47. Again, while there are some variability between the donors, the data generally suggest that ICOS-targeted IL-15/Rα-Fc fusions are more potent in inducing activation of CD8⁺CD45RA⁻, CD8⁺CD45RA⁺, and CD4⁺CD45RA⁻ T cells in comparison to untargeted IL-15/Rα-Fc fusion (as well as control RSV-targeted IL-15/Rα-Fc fusion).

[0670] Further, we investigated the expression of HLA-DR (another activation marker) on various T cell populations, data for which are depicted in FIG. 48-54Y.

### C. Example 3: Generation of ICOS-Targeted IL-15/Rα-Fc Fusions Having Alternative IL-15 Potency Variants

[0671] 1. 3A: IL-15-Fc Fusions Comprising IL-15(N4D/N65D) Variant Demonstrate Reduced Pharmacokinetics

[0672] In a study investigating the pharmacokinetics of IL-15-Fc potency variants with Xtend, cynomolgus monkeys were administered a first single intravenous (i.v.) dose of XENP22853 (WT IL-15/Rα-heteroFc with Xtend), XENP24306 (IL-15(D30N/E64Q/N65D)/Rα-heteroFc with Xtend), XENP24113 (IL-15(N4D/N65D)/Rα-heteroFc with Xtend), and XENP24294 (scIL-15(N4D/N65D)/Rα-Fc with Xtend) at varying concentrations.

[0673] FIG. 59 depicts the serum concentration of the test articles over time following the first dose. As expected, incorporating potency variants in addition to Xtend substitution (as in XENP24306 and XENP24113) greatly improves the pharmacokinetics of IL-15-Fc fusions (in comparison to XENP22583). Unexpectedly, however, IL-15/Rα-heteroFc fusion XENP24113 and scIL-15/Rα-Fc fusion XENP24294 (which have the same IL-15(N4D/N65D) potency variant) demonstrated reduced pharmacokinetics in comparison to XENP24306. This suggests that the reduced pharmacokinetics was due to the particular IL-15 potency variant rather than the format of the IL-15-Fc fusion. While a decrease in pharmacokinetics for XENP24113 and XENP24294 was expected on the basis of previous findings which demonstrated that the IL-15-Fc fusions having IL-15(N4D/N65D) variant had greater in vitro potency than IL-15-Fc fusions having the IL-15(D30N/E64Q/N65D) variant, the decrease in pharmacokinetics was unexpectedly disproportionate to the increase in potency. Accordingly, we sought to identify alternative IL-15 potency variants for use in the LAG-3-targeted IL-15-Fc fusions of the invention.

[0674] 2. 3B: ICOS-Targeted IL-15-Fc Fusions Comprising IL-15(D30N/N65D)

[0675] We noted that IL-15(N4D/N65D) has both its substitutions at the IL-15 interface responsible for binding to CD122, while IL-15(D30N/E64Q/N65D) has two substitutions (E64Q and N65D) at IL-15:CD122 interface; and one substitution (D30N) at the IL-15 interface responsible for binding to CD132. Accordingly, we reasoned that the modification at the IL-15:CD132 interface may contribute to the superior pharmacokinetics observed for XENP24306. In view of the above, we produced illustrative ICOS-targeted IL-15-Fc fusion XENP29978 comprising the IL-15(D30N/N65D) variant (and Xtend analog XENP30812), sequences for which are depicted in FIG. 26, with additional sequences depicted in FIG. 61. We also generated a control RSV-targeted IL-15/Rα-Fc fusion protein XENP29481 with IL-15(D30N/N65D) variant, sequences for which are depicted in FIG. 27.

[0676] 3. 3C: ICOS-Targeted IL-15-Fc Fusions Comprising IL-15(D30N/E64Q/N65D)

[0677] Although the ICOS-targeted IL-15/Rα-Fc fusions were designed with targeting to the tumor environment via the ICOS-targeting arm in mind, the cytokine moiety is still capable of signaling before reaching the tumor site and may contribute to systemic toxicity. Accordingly, we sought to further reduce the IL-15 potency by constructing ICOS-targeted IL-15/Rα-Fc fusions with IL-15(D30N/E64Q/N65D) variant, which as described in Example 1B(a) has drastically reduced activity. Sequences for illustrative ICOS-targeted IL-15/Rα-Fc fusions comprising IL-15(D30N/E64Q/N65D) variant are depicted in FIG. 26 as XENP30810 (and Xtend analog as XENP30813), with additional sequences depicted in FIG. 61. Additionally, we constructed XENP30432, a RSV-targeted IL-15/Rα-Fc fusion comprising IL-15(D30N/E64Q/N65D) variant (sequences for which are depicted in FIG. 27) to act as a surrogate for investigating the behavior of ICOS-targeted IL-15/Rα-Fc fusions comprising IL-15(D30N/E64Q/N65D) variant outside of the tumor environment.

The application's sequence listing, which the Patent Office published only in electronic form, follows.

SEQUENCE LISTING (802 sequences)

SEQ ID NO: 1 - protein, 162 aa, Homo sapiens
  Human IL-15 precursor sequence sp|P40933
MRISKPHLRSISIQCYLCLLLNSHFLTEAGIHVFILGCFSAGLPKTEANWVNVISDLKKIEDLIQSMHIDATLYTESDVHPSCKVTAMKCFLLELQVISLESGDASIHDTVENLIILANNSLSSNGNVTESGCKECEELEEKNIKEFLQSFVHIVQMFINTS

SEQ ID NO: 2 - protein, 114 aa, Homo sapiens
  Human IL-15 mature form sequence sp|P40933|49-162
NWVNVISDLKKIEDLIQSMHIDATLYTESDVHPSCKVTAMKCFLLELQVISLESGDASIHDTVENLIILANNSLSSNGNVTESGCKECEELEEKNIKEFLQSFVHIVQMFINTS

SEQ ID NO: 3 - protein, 267 aa, Homo sapiens
  Human IL-15Ralpha sequence sp|Q13261
MAPRRARGCRTLGLPALLLLLLLRPPATRGITCPPPMSVEHADIWVKSYSLYSRERYICNSGFKRKAGTSSLTECVLNKATNVAHWTTPSLKCIRDPALVHQRPAPPSTVTTAGVTPQPESLSPSGKEPAASSPSSNNTAATTAAIVPGSQLMPSKSPSTGTTEISSHESSHGTPSQTTAKNWELTASASHQPPGVYPQGHSDTTVAISTSTVLLCGLSAVSLLACYLKSRQTPPLASVEMEAMEALPVTWGTSSRDEDLENCSHHL

SEQ ID NO: 4 - protein, 175 aa, Homo sapiens
  Human IL-15Ralpha, extracellular domain sp|Q13261|31-205
ITCPPPMSVEHADIWVKSYSLYSRERYICNSGFKRKAGTSSLTECVLNKATNVAHWTTPSLKCIRDPALVHQRPAPPSTVTTAGVTPQPESLSPSGKEPAASSPSSNNTAATTAAIVPGSQLMPSKSPSTGTTEISSHESSHGTPSQTTAKNWELTASASHQPPGVYPQGHSDTT

SEQ ID NO: 5 - protein, 65 aa, Homo sapiens
  Human IL-15Ralpha, sushi domain sp|Q13261|31-95
ITCPPPMSVEHADIWVKSYSLYSRERYICNSGFKRKAGTSSLTECVLNKATNVAHWTTPSLKCIR

SEQ ID NO: 6 - protein, 551 aa, Homo sapiens
  Human IL-15Rbeta sequence sp|P14784
MAAPALSWRLPLLILLLPLATSWASAAVNGTSQFTCFYNSRANISCVWSQDGALQDTSCQVHAWPDRRRWNQTCELLPVSQASWACNLILGAPDSQKLTTVDIVTLRVLCREGVRWRVMAIQDFKPFENLRLMAPISLQVVHVETHRCNISWEISQASHYFERHLEFEARTLSPGHTWEEAPLLTLKQKQEWICLETLTPDTQYEFQVRVKPLQGEFTTWSPWSQPLAFRTKPAALGKDTIPWLGHLLVGLSGAFGFIILVYLLINCRNTGPWLKKVLKCNTPDPSKFFSQLSSEHGGDVQKWLSSPFPSSSFSPGGLAPEISPLEVLERDKVTQLLLQQDKVPEPASLSSNHSLTSCFTNQGYFFFHLPDALEIEACQVYFTYDPYSEEDPDEGVAGAPTGSSPQPLQPLSGEDDAYCTFPSRDDLLLFSPSLLGGPSPPSTAPGGSGAGEERMPPSLQERVPRDWDPQPLGPPTPGVPDLVDFQPPPELVLREAGEEVPDAGPREGVSFPWSRPPGQGEFRALNARLPLNTDAYLSLQELQGQDPTHLV

SEQ ID NO: 7 - protein, 214 aa, Homo sapiens
  Human IL-15Rbeta, extracellular domain sp|P14784|27-240
AVNGTSQFTCFYNSRANISCVWSQDGALQDTSCQVHAWPDRRRWNQTCELLPVSQASWACNLILGAPDSQKLTTVDIVTLRVLCREGVRWRVMAIQDFKPFENLRLMAPISLQVVHVETHRCNISWEISQASHYFERHLEFEARTLSPGHTWEEAPLLTLKQKQEWICLETLTPDTQYEFQVRVKPLQGEFTTWSPWSQPLAFRTKPAALGKDT

SEQ ID NO: 8 - protein, 369 aa, Homo sapiens
  Human common gamma chain sequence sp|P31785
MLKPSLPFTSLLFLQLPLLGVGLNTTILTPNGNEDTTADFFLTTMPTDSLSVSTLPLPEVQCFVFNVEYMNCTWNSSSEPQPTNLTLHYWYKNSDNDKVQKCSHYLFSEEITSGCQLQKKEIHLYQTFVVQLQDPREPRRQATQMLKLQNLVIPWAPENLTLHKLSESQLELNWNNRFLNHCLEHLVQYRTDWDHSWTEQSVDYRHKFSLPSVDGQKRYTFRVRSRFNPLCGSAQHWSEWSHPIHWGSNTSKENPFLFALEAVVISVGSMGLIISLLCVYFWLERTMPRIPTLKNLEDLVTEYHGNFSAWSGVSKGLAESLQPDYSERLCLVSEIPPKGGALGEGPGASPCNQHSPYWAPPCYTLKPET

SEQ ID NO: 9 - protein, 240 aa, Homo sapiens
  Human common gamma chain, extracellular domain sp|P31785|23-262
LNTTILTPNGNEDTTADFFLTTMPTDSLSVSTLPLPEVQCFVFNVEYMNCTWNSSSEPQPTNLTLHYWYKNSDNDKVQKCSHYLFSEEITSGCQLQKKEIHLYQTFVVQLQDPREPRRQATQMLKLQNLVIPWAPENLTLHKLSESQLELNWNNRFLNHCLEHLVQYRTDWDHSWTEQSVDYRHKFSLPSVDGQKRYTFRVRSRFNPLCGSAQHWSEWSHPIHWGSNTSKENPFLFALEA

SEQ ID NO: 10 - protein, 199 aa, Homo sapiens
  Human ICOS sequence sp|Q9Y6W8
MKSGLWYFFLFCLRIKVLTGEINGSANYEMFIFHNGGVQILCKYPDIVQQFKMQLLKGGQILCDLTKTKGSGNTVSIKSLKFCHSQLSNNSVSFFLYNLDHSHANYYFCNLSIFDPPPFKVTLTGGYLHIYESQLCCQLKFWLPIGCAAFVVVCILGCILICWLTKKKYSSSVHDPNGEYMFMRAVNTAKKSRLTDVTL

SEQ ID NO: 11 - protein, 120 aa, Homo sapiens
  Human ICOS sequence, extracellular domain sp|Q9Y6W8|21-140
EINGSANYEMFIFHNGGVQILCKYPDIVQQFKMQLLKGGQILCDLTKTKGSGNTVSIKSLKFCHSQLSNNSVSFFLYNLDHSHANYYFCNLSIFDPPPFKVTLTGGYLHIYESQLCCQLK

SEQ ID NO: 12 - protein, 199 aa, Macaca fascicularis
  Macaca fascicularis ICOS sequence gi|544477053|ref| XP_005574075.1
MKSGLWYFFLFCLHMKVLTGEINGSANYEMFIFHNGGVQILCKYPDIVQQFKMQLLKGGQILCDLTKTKGSGNTVSIKSLKFCHSQLSNNSVSFFLYNLDRSHANYYFCNLSIFDPPPFKVTLTGGYLHIYESQLCCQLKFWLPIGCATFVVVCIFGCILICWLTKKKYSSTVHDPNGEYMFMRAVNTAKKSRLTDVTV

SEQ ID NO: 13 - protein, 120 aa, Macaca fascicularis
  Macaca fascicularis ICOS sequence, extracellular domain (predicted) gi|544477053|ref|XP_005574075.1|21-140
EINGSANYEMFIFHNGGVQILCKYPDIVQQFKMQLLKGGQILCDLTKTKGSGNTVSIKSLKFCHSQLSNNSVSFFLYNLDRSHANYYFCNLSIFDPPPFKVTLTGGYLHIYESQLCCQLK

SEQ ID NO: 14 - protein, 5 aa, Artificial Sequence
  Description of Artificial Sequence: Synthetic peptide
GGGGS

SEQ ID NO: 15 - protein, 10 aa, Artificial Sequence
  Description of Artificial Sequence: Synthetic peptide
GGGGSGGGGS

SEQ ID NO: 16 - protein, 15 aa, Artificial Sequence
  Description of Artificial Sequence: Synthetic peptide
GGGGSGGGGSGGGGS

SEQ ID NO: 17 - protein, 20 aa, Artificial Sequence
  Description of Artificial Sequence: Synthetic peptide
GGGGSGGGGSGGGGSGGGGS

SEQ ID NO: 18 - protein, 25 aa, Artificial Sequence
  Description of Artificial Sequence: Synthetic peptide
GGGGSGGGGSGGGGSGGGGSGGGGS

SEQ ID NO: 19 - protein, 30 aa, Artificial Sequence
  Description of Artificial Sequence: Synthetic polypeptide
GGGGSGGGGSGGGGSGGGGSGGGGSGGGGS

SEQ ID NO: 20 - protein, 35 aa, Artificial Sequence
  Description of Artificial Sequence: Synthetic polypeptide
GGGGSGGGGSGGGGSGGGGSGGGGSGGGGSGGGGS

SEQ ID NO: 21 - protein, 30 aa, Artificial Sequence
  Description of Artificial Sequence: Synthetic polypeptide
DPALVHQRPAPPGGGGSGGGGSGGGGSGGG

SEQ ID NO: 22 - protein, 5 aa, Artificial Sequence
  Description of Artificial Sequence: Synthetic peptide
GKPGS

SEQ ID NO: 23 - protein, 25 aa, Artificial Sequence
  Description of Artificial Sequence: Synthetic peptide
GKPGSGKPGSGKPGSGKPGSGKPGS

SEQ ID NO: 24 - protein, 30 aa, Artificial Sequence
  Description of Artificial Sequence: Synthetic polypeptide
GKPGSGKPGSGKPGSGKPGSGKPGSGKPGS

SEQ ID NO: 25 - protein, 5 aa, Artificial Sequence
  Description of Artificial Sequence: Synthetic peptide
GGGES

SEQ ID NO: 26 - protein, 15 aa, Artificial Sequence
  Description of Artificial Sequence: Synthetic peptide
GGGGSGGGGSGGGGS

SEQ ID NO: 27 - protein, 18 aa, Artificial Sequence
  Description of Artificial Sequence: Synthetic peptide
GSTSGSGKPGSGEGSTKG

SEQ ID NO: 28 - protein, 14 aa, Artificial Sequence
  Description of Artificial Sequence: Synthetic peptide
IRPRAIGGSKPRVA

SEQ ID NO: 29 - protein, 15 aa, Artificial Sequence
  Description of Artificial Sequence: Synthetic peptide
GKGGSGKGGSGKGGS

SEQ ID NO: 30 - protein, 15 aa, Artificial Sequence
  Description of Artificial Sequence: Synthetic peptide
GGKGSGGKGSGGKGS

SEQ ID NO: 31 - protein, 15 aa, Artificial Sequence
  Description of Artificial Sequence: Synthetic peptide
GGGKSGGGKSGGGKS

SEQ ID NO: 32 - protein, 15 aa, Artificial Sequence
  Description of Artificial Sequence: Synthetic peptide
GKGKSGKGKSGKGKS

SEQ ID NO: 33 - protein, 15 aa, Artificial Sequence
  Description of Artificial Sequence: Synthetic peptide
GGGKSGGKGSGKGGS

SEQ ID NO: 34 - protein, 15 aa, Artificial Sequence
  Description of Artificial Sequence: Synthetic peptide
GKPGSGKPGSGKPGS

SEQ ID NO: 35 - protein, 20 aa, Artificial Sequence
  Description of Artificial Sequence: Synthetic peptide
GKPGSGKPGSGKPGSGKPGS

SEQ ID NO: 36 - protein, 20 aa, Artificial Sequence
  Description of Artificial Sequence: Synthetic peptide
GKGKSGKGKSGKGKSGKGKS

SEQ ID NO: 37 - protein, 20 aa, Artificial Sequence
  Description of Artificial Sequence: Synthetic peptide
GGGGSGGGGSGGGGSGGGGS

SEQ ID NO: 38 - protein, 14 aa, Artificial Sequence
  Description of Artificial Sequence: Synthetic peptide
STAGDTHLGGEDFD

SEQ ID NO: 39 - protein, 15 aa, Artificial Sequence
  Description of Artificial Sequence: Synthetic peptide
GEGGSGEGGSGEGGS

SEQ ID NO: 40 - protein, 15 aa, Artificial Sequence
  Description of Artificial Sequence: Synthetic peptide
GGEGSGGEGSGGEGS

SEQ ID NO: 41 - protein, 15 aa, Artificial Sequence
  Description of Artificial Sequence: Synthetic peptide
GGGESGGGESGGGES

SEQ ID NO: 42 - protein, 15 aa, Artificial Sequence
  Description of Artificial Sequence: Synthetic peptide
GEGESGEGESGEGES

SEQ ID NO: 43 - protein, 15 aa, Artificial Sequence
  Description of Artificial Sequence: Synthetic peptide
GGGESGGEGSGEGGS

SEQ ID NO: 44 - protein, 20 aa, Artificial Sequence
  Description of Artificial Sequence: Synthetic peptide
GEGESGEGESGEGESGEGES

SEQ ID NO: 45 - protein, 15 aa, Artificial Sequence
  Description of Artificial Sequence: Synthetic peptide
GGGGSGGGGSGGGGS

SEQ ID NO: 46 - protein, 20 aa, Artificial Sequence
  Description of Artificial Sequence: Synthetic peptide
GGGGSGGGGSGGGGSGGGGS

SEQ ID NO: 47 - protein, 18 aa, Artificial Sequence
  Description of Artificial Sequence: Synthetic peptide
GSTSGSGKPGSGEGSTKG

SEQ ID NO: 48 - protein, 19 aa, Artificial Sequence
  Description of Artificial Sequence: Synthetic peptide
PRGASKSGSASQTGSAPGS

SEQ ID NO: 49 - protein, 19 aa, Artificial Sequence
  Description of Artificial Sequence: Synthetic peptide
GTAAAGAGAAGGAAAGAAG

SEQ ID NO: 50 - protein, 19 aa, Artificial Sequence
  Description of Artificial Sequence: Synthetic peptide
GTSGSSGSGSGGSGSGGGG

SEQ ID NO: 51 - protein, 20 aa, Artificial Sequence
  Description of Artificial Sequence: Synthetic peptide
GKPGSGKPGSGKPGSGKPGS

SEQ ID NO: 52 - protein, 231 aa, Artificial Sequence
  Description of Artificial Sequence: Synthetic polypeptide
  IL-15/Ralpha-Fc Backbone 1 IL-15/Ralpha-Fc monomer 1
EPKSSDKTHTCPPCPAPPVAGPSVFLFPPKPKDTLMISRTPEVTCVVVDVKHEDPEVKFNWYVDGVEVHNAKTKPREEQYNSTYRVVSVLTVLHQDWLNGKEYKCKVSNKALPAPIEKTISKAKGQPREPQVYTLPPSREQMTKNQVKLTCLVKGFYPSDIAVEWESNGQPENNYKTTPPVLDSDGSFFLYSKLTVDKSRWQQGNVFSCSVMHEALHNHYTQKSLSLSPGK

SEQ ID NO: 53 - protein, 231 aa, Artificial Sequence
  Description of Artificial Sequence: Synthetic polypeptide
  IL-15/Ralpha-Fc Backbone 1 IL-15/Ralpha-Fc monomer 2
EPKSSDKTHTCPPCPAPPVAGPSVFLFPPKPKDTLMISRTPEVTCVVVDVKHEDPEVKFNWYVDGVEVHNAKTKPREEEYNSTYRVVSVLTVLHQDWLNGKEYKCKVSNKALPAPIEKTISKAKGQPREPQVYTLPPSREEMTKNQVSLTCDVSGFYPSDIAVEWESDGQPENNYKTTPPVLDSDGSFFLYSKLTVDKSRWEQGDVFSCSVMHEALHNHYTQKSLSLSPGK

SEQ ID NO: 54 - protein, 231 aa, Artificial Sequence
  Description of Artificial Sequence: Synthetic polypeptide
  IL-15/Ralpha-Fc Backbone 2 IL-15/Ralpha-Fc monomer 1
EPKSSDKTHTCPPCPAPPVAGPSVFLFPPKPKDTLMISRTPEVTCVVVDVKHEDPEVKFNWYVDGVEVHNAKTKPREEQYNSTYRVVSVLTVLHQDWLNGKEYKCKVSNKALPAPIEKTISKAKGQPREPQVYTLPPSREEMTKNQVKLTCLVKGFYPSDIAVEWESNGQPENNYKTTPPVLDSDGSFFLYSKLTVDKSRWQQGNVFSCSVMHEALHNHYTQKSLSLSPGK

SEQ ID NO: 55 - protein, 231 aa, Artificial Sequence; identical to SEQ ID NO: 53
  Description of Artificial Sequence: Synthetic polypeptide
  IL-15/Ralpha-Fc Backbone 2 IL-15/Ralpha-Fc monomer 2

SEQ ID NO: 56 - protein, 231 aa, Artificial Sequence; identical to SEQ ID NO: 54
  Description of Artificial Sequence: Synthetic polypeptide
  IL-15/Ralpha-Fc Backbone 3 IL-15/Ralpha-Fc monomer 1

SEQ ID NO: 57 - protein, 231 aa, Artificial Sequence
  Description of Artificial Sequence: Synthetic polypeptide
  IL-15/Ralpha-Fc Backbone 3 IL-15/Ralpha-Fc monomer 2
EPKSSDKTHTCPPCPAPPVAGPSVFLFPPKPKDTLMISRTPEVTCVVVDVKHEDPEVKFNWYVDGVEVHNAKTKPREEEYNSTYRVVSVLTVLHQDWLNGKEYKCKVSNKALPAPIEKTISKAKGQPREPQVYTLPPSREEMTKNQVSLTCEVSGFYPSDIAVEWESDGQPENNYKTTPPVLDSDGSFFLYSKLTVDKSRWEQGDVFSCSVMHEALHNHYTQKSLSLSPGK

SEQ ID NO: 58 - protein, 231 aa, Artificial Sequence
  Description of Artificial Sequence: Synthetic polypeptide
  IL-15/Ralpha-Fc Backbone 4 IL-15/Ralpha-Fc monomer 1
EPKSSDKTHTCPPCPAPPVAGPSVFLFPPKPKDTLMISRTPEVTCVVVDVKHEDPEVKFNWYVDGVEVHNAKTKPREEQYNSTYRVVSVLTVLHQDWLNGKEYKCKVSNKALPAPIEKTISKAKGQPREPQVYTLPPSREEMTKNQVSLTCLVKGFYPSDIAVEWESNGQPENNYKTTPPVLDSKGSFFLYSKLTVDKSRWQQGNVFSCSVMHEALHNHYTQKSLSLSPGK

SEQ ID NO: 59 - protein, 231 aa, Artificial Sequence
  Description of Artificial Sequence: Synthetic polypeptide
  IL-15/Ralpha-Fc Backbone 4 IL-15/Ralpha-Fc monomer 2
EPKSSDKTHTCPPCPAPPVAGPSVFLFPPKPKDTLMISRTPEVTCVVVDVKHEDPEVKFNWYVDGVEVHNAKTKPREEEYNSTYRVVSVLTVLHQDWLNGKEYKCKVSNKALPAPIEKTISKAKGQPREPQVYTLPPSREEMTENEVSLTCLVKGFYPSDIAVEWESDGQPENNYKTTPPVLDSDGSFFLYSKLEVDKSRWEQGDVFSCSVMHEALHNHYTQKSLSLSPGK

SEQ ID NO: 60 - protein, 231 aa, Artificial Sequence
  Description of Artificial Sequence: Synthetic polypeptide
  IL-15/Ralpha-Fc Backbone 5 IL-15/Ralpha-Fc monomer 1
EPKSSDKTHTCPPCPAPPVAGPSVFLFPPKPKDTLMISRTPEVTCVVVDVKHEDPEVKFNWYVDGVEVHNAKTKPREEQYNSTYRVVSVLTVLHQDWLNGKEYKCKVSNKALPAPIEKTISKAKGQPREPQVYTLPPSRDQLTKNQVKLTCLVKGFYPSDIAVEWESNGQPENNYKTTPPVLDSDGSFFLYSKLTVDKSRWQQGNVFSCSVMHEALHNHYTQKSLSLSPGK

SEQ ID NO: 61 - protein, 231 aa, Artificial Sequence
  Description of Artificial Sequence: Synthetic polypeptide
  IL-15/Ralpha-Fc Backbone 5 IL-15/Ralpha-Fc monomer 2
EPKSSDKTHTCPPCPAPPVAGPSVFLFPPKPKDTLMISRTPEVTCVVVDVKHEDPEVKFNWYVDGVEVHNAKTKPREEEYNSTYRVVSVLTVLHQDWLNGKEYKCKVSNKALPAPIEKTISKAKGQPREPQVYTLPPSRDELTKNQVSLTCDVSGFYPSDIAVEWESDGQPENNYKTTPPVLDSDGSFFLYSKLTVDKSRWEQGDVFSCSVMHEALHNHYTQKSLSLSPGK

SEQ ID NO: 62 - protein, 231 aa, Artificial Sequence
  Description of Artificial Sequence: Synthetic polypeptide
  IL-15/Ralpha-Fc Backbone 6 IL-15/Ralpha-Fc monomer 1
EPKSSDKTHTCPPCPAPPVAGPSVFLFPPKPKDTLMISRTPEVTCVVVDVKHEDPEVKFNWYVDGVEVHNAKTKPREEQYASTYRVVSVLTVLHQDWLNGKEYKCKVSNKALPAPIEKTISKAKGQPREPQVYTLPPSREQMTKNQVKLTCLVKGFYPSDIAVEWESNGQPENNYKTTPPVLDSDGSFFLYSKLTVDKSRWQQGNVFSCSVMHEALHNHYTQKSLSLSPGK

SEQ ID NO: 63 - protein, 231 aa, Artificial Sequence
  Description of Artificial Sequence: Synthetic polypeptide
  IL-15/Ralpha-Fc Backbone 6 IL-15/Ralpha-Fc monomer 2
EPKSSDKTHTCPPCPAPPVAGPSVFLFPPKPKDTLMISRTPEVTCVVVDVKHEDPEVKFNWYVDGVEVHNAKTKPREEEYASTYRVVSVLTVLHQDWLNGKEYKCKVSNKALPAPIEKTISKAKGQPREPQVYTLPPSREEMTKNQVSLTCDVSGFYPSDIAVEWESDGQPENNYKTTPPVLDSDGSFFLYSKLTVDKSRWEQGDVFSCSVMHEALHNHYTQKSLSLSPGK

SEQ ID NO: 64 - protein, 231 aa, Artificial Sequence
  Description of Artificial Sequence: Synthetic polypeptide
  IL-15/Ralpha-Fc Backbone 7 IL-15/Ralpha-Fc monomer 1
EPKSSDKTHTCPPCPAPPVAGPSVFLFPPKPKDTLMISRTPEVTCVVVDVKHEDPEVKFNWYVDGVEVHNAKTKPREEQYSSTYRVVSVLTVLHQDWLNGKEYKCKVSNKALPAPIEKTISKAKGQPREPQVYTLPPSREQMTKNQVKLTCLVKGFYPSDIAVEWESNGQPENNYKTTPPVLDSDGSFFLYSKLTVDKSRWQQGNVFSCSVMHEALHNHYTQKSLSLSPGK

SEQ ID NO: 65 - protein, 231 aa, Artificial Sequence
  Description of Artificial Sequence: Synthetic polypeptide
  IL-15/Ralpha-Fc Backbone 7 IL-15/Ralpha-Fc monomer 2
EPKSSDKTHTCPPCPAPPVAGPSVFLFPPKPKDTLMISRTPEVTCVVVDVKHEDPEVKFNWYVDGVEVHNAKTKPREEEYSSTYRVVSVLTVLHQDWLNGKEYKCKVSNKALPAPIEKTISKAKGQPREPQVYTLPPSREEMTKNQVSLTCDVSGFYPSDIAVEWESDGQPENNYKTTPPVLDSDGSFFLYSKLTVDKSRWEQGDVFSCSVMHEALHNHYTQKSLSLSPGK

SEQ ID NO: 66 - protein, 229 aa, Artificial Sequence
  Description of Artificial Sequence: Synthetic polypeptide
  IL-15/Ralpha-Fc Backbone 8 IL-15/Ralpha-Fc monomer 1
ESKYGPPCPPCPAPEFLGGPSVFLFPPKPKDTLMISRTPEVTCVVVDVSQEDPEVQFNWYVDGVEVHNAKTKPREEQFNSTYRVVSVLTVLHQDWLNGKEYKCKVSNKGLPSSIEKTISKAKGQPREPQVYTLPPSQEQMTKNQVKLTCLVKGFYPSDIAVEWESNGQPENNYKTTPPVLDSDGSFFLYSRLTVDKSRWQEGNVFSCSVMHEALHNHYTQKSLSLSLGK

SEQ ID NO: 67 - protein, 229 aa, Artificial Sequence
  Description of Artificial Sequence: Synthetic polypeptide
  IL-15/Ralpha-Fc Backbone 8 IL-15/Ralpha-Fc monomer 2
ESKYGPPCPPCPAPEFLGGPSVFLFPPKPKDTLMISRTPEVTCVVVDVSQEDPEVQFNWYVDGVEVHNAKTKPREEEFNSTYRVVSVLTVLHQDWLNGKEYKCKVSNKGLPSSIEKTISKAKGQPREPQVYTLPPSQEEMTKNQVSLTCDVSGFYPSDIAVEWESDGQPENNYKTTPPVLDSDGSFFLYSRLTVDKSRWEEGDVFSCSVMHEALHNHYTQKSLSLSLGK

SEQ ID NO: 68 - protein, 228 aa, Artificial Sequence
  Description of Artificial Sequence: Synthetic polypeptide
  IL-15/Ralpha-Fc Backbone 9 IL-15/Ralpha-Fc monomer 1
ERKCCVECPPCPAPPVAGPSVFLFPPKPKDTLMISRTPEVTCVVVDVSHEDPEVQFNWYVDGVEVHNAKTKPREEQFNSTFRVVSVLTVVHQDWLNGKEYKCKVSNKGLPAPIEKTISKTKGQPREPQVYTLPPSREQMTKNQVKLTCLVKGFYPSDIAVEWESNGQPENNYKTTPPMLDSDGSFFLYSKLTVDKSRWQQGNVFSCSVMHEALHNHYTQKSLSLSPGK

SEQ ID NO: 69 - protein, 228 aa, Artificial Sequence
  Description of Artificial Sequence: Synthetic polypeptide
  IL-15/Ralpha-Fc Backbone 9 IL-15/Ralpha-Fc monomer 2
ERKCCVECPPCPAPPVAGPSVFLFPPKPKDTLMISRTPEVTCVVVDVSHEDPEVQFNWYVDGVEVHNAKTKPREEEFNSTFRVVSVLTVVHQDWLNGKEYKCKVSNKGLPAPIEKTISKTKGQPREPQVYTLPPSREEMTKNQVSLTCDVSGFYPSDIAVEWESDGQPENNYKTTPPMLDSDGSFFLYSKLTVDKSRWEQGDVFSCSVMHEALHNHYTQKSLSLSPGK

SEQ ID NO: 70 - protein, 228 aa, Artificial Sequence
  Description of Artificial Sequence: Synthetic polypeptide
  IL-15/Ralpha-Fc Backbone 10 IL-15/Ralpha-Fc monomer 1
ERKCCVECPPCPAPPVAGPSVFLFPPKPKDTLMISRTPEVTCVVVDVKHEDPEVQFNWYVDGVEVHNAKTKPREEQFNSTFRVVSVLTVVHQDWLNGKEYKCKVSNKGLPAPIEKTISKTKGQPREPQVYTLPPSREQMTKNQVKLTCLVKGFYPSDIAVEWESNGQPENNYKTTPPMLDSDGSFFLYSKLTVDKSRWQQGNVFSCSVMHEALHNHYTQKSLSLSPGK

SEQ ID NO: 71 - protein, 228 aa, Artificial Sequence
  Description of Artificial Sequence: Synthetic polypeptide
  IL-15/Ralpha-Fc Backbone 10 IL-15/Ralpha-Fc monomer 2
ERKCCVECPPCPAPPVAGPSVFLFPPKPKDTLMISRTPEVTCVVVDVKHEDPEVQFNWYVDGVEVHNAKTKPREEEFNSTFRVVSVLTVVHQDWLNGKEYKCKVSNKGLPAPIEKTISKTKGQPREPQVYTLPPSREEMTKNQVSLTCDVSGFYPSDIAVEWESDGQPENNYKTTPPMLDSDGSFFLYSKLTVDKSRWEQGDVFSCSVMHEALHNHYTQKSLSLSPGK

SEQ ID NO: 72 - protein, 231 aa, Artificial Sequence
  Description of Artificial Sequence: Synthetic polypeptide
  IL-15/Ralpha-Fc Backbone 11 IL-15/Ralpha-Fc monomer 1
EPKSSDKTHTCPPCPAPPVAGPSVFLFPPKPKDTLMISRTPEVTCVVVDVKHEDPEVKFNWYVDGVEVHNAKTKPREEQYNSTYRVVSVLTVLHQDWLNGKEYKCKVSNKALPAPIEKTISKAKGQPREPQVYTLPPSREQMTKNQVKLTCLVKGFYPSDIAVEWESNGQPENNYKTTPPVLDSDGSFFLYSKLTVDKSRWQQGNVFSCSVLHEALHSHYTQKSLSLSPGK

SEQ ID NO: 73 - protein, 231 aa, Artificial Sequence
  Description of Artificial Sequence: Synthetic polypeptide
  IL-15/Ralpha-Fc Backbone 11 IL-15/Ralpha-Fc monomer 2
EPKSSDKTHTCPPCPAPPVAGPSVFLFPPKPKDTLMISRTPEVTCVVVDVKHEDPEVKFNWYVDGVEVHNAKTKPREEEYNSTYRVVSVLTVLHQDWLNGKEYKCKVSNKALPAPIEKTISKAKGQPREPQVYTLPPSREEMTKNQVSLTCDVSGFYPSDIAVEWESDGQPENNYKTTPPVLDSDGSFFLYSKLTVDKSRWEQGDVFSCSVLHEALHSHYTQKSLSLSPGK

SEQ ID NO: 74 - protein, 231 aa, Artificial Sequence
  Description of Artificial Sequence: Synthetic polypeptide
  IL-15/Ralpha-Fc Backbone 12 IL-15/Ralpha-Fc monomer 1
EPKSSDKTHTCPPCPAPPVAGPSVFLFPPKPKDTLMISRTPEVTCVVVDVKHEDPEVKFNWYVDGVEVHNAKTKPREEQYNSTYRVVSVLTVLHQDWLNGKEYKCKVSNKALPAPIEKTISKAKGQPREPQVYTLPPSREEMTKNQVSLTCLVKGFYPSDIAVEWESNGQPENNYKTTPPVLDSDGSFFLYSKLTVDKSRWQQGNVFSCSVMHEALHNHYTQKSLSLSPGK

SEQ ID NO: 75 - protein, 231 aa, Artificial Sequence; identical to SEQ ID NO: 74
  Description of Artificial Sequence: Synthetic polypeptide
  IL-15/Ralpha-Fc Backbone 12 IL-15/Ralpha-Fc monomer 2

SEQ ID NO: 76 - protein, 231 aa, Artificial Sequence; identical to SEQ ID NO: 53
  Description of Artificial Sequence: Synthetic polypeptide
  IL-15/Ralpha-Fc Backbone 13 IL-15/Ralpha-Fc monomer 1

SEQ ID NO: 77 - protein, 231 aa, Artificial Sequence
  Description of Artificial Sequence: Synthetic polypeptide
  IL-15/Ralpha-Fc Backbone 13 IL-15/Ralpha-Fc monomer 2
ERKSSDKTHTCPRCPAPPVAGPSVFLFPPKPKDTLMISRTPEVTCVVVDVKHEDPEVKFKWYVDGVEVHNAKTKPREEQYNSTYRVVSVLTVLHQDWLNGKEYKCKVSNKALPAPIEKTISKAKGQPREPQVYTLPPSREQMTKNQVKLTCLVKGFYPSDIAVEWESNGQPENNYKTTPPVLDSDGSFFLYSKLTVDKSRWQQGNVFSCSVMHEALHNHYTQKSLSLSPGK

SEQ ID NO: 78 - protein, 329 aa, Artificial Sequence
  Description of Artificial Sequence: Synthetic polypeptide
  IL-15/Ralpha x anti-ICOS Backbone 1 Chain 1
ASTKGPSVFPLAPSSKSTSGGTAALGCLVKDYFPEPVTVSWNSGALTSGVHTFPAVLQSSGLYSLSSVVTVPSSSLGTQTYICNVNHKPSNTKVDKKVEPKSCDKTHTCPPCPAPPVAGPSVFLFPPKPKDTLMISRTPEVTCVVVDVKHEDPEVKFNWYVDGVEVHNAKTKPREEQYNSTYRVVSVLTVLHQDWLNGKEYKCKVSNKALPAPIEKTISKAKGQPREPQVYTLPPSREQMTKNQVKLTCLVKGFYPSDIAVEWESNGQPENNYKTTPPVLDSDGSFFLYSKLTVDKSRWQQGNVFSCSVMHEALHNHYTQKSLSLSPGK

SEQ ID NO: 79 - protein, 231 aa, Artificial Sequence; identical to SEQ ID NO: 53
  Description of Artificial Sequence: Synthetic polypeptide
  IL-15/Ralpha x anti-ICOS Backbone 1 Chain 2

SEQ ID NO: 80 - protein, 329 aa, Artificial Sequence
  Description of Artificial Sequence: Synthetic polypeptide
  IL-15/Ralpha x anti-ICOS Backbone 2 Chain 1
ASTKGPSVFPLAPSSKSTSGGTAALGCLVKDYFPEPVTVSWNSGALTSGVHTFPAVLQSSGLYSLSSVVTVPSSSLGTQTYICNVNHKPSDTKVDKKVEPKSCDKTHTCPPCPAPPVAGPSVFLFPPKPKDTLMISRTPEVTCVVVDVKHEDPEVKFNWYVDGVEVHNAKTKPREEEYNSTYRVVSVLTVLHQDWLNGKEYKCKVSNKALPAPIEKTISKAKGQPREPQVYTLPPSREEMTKNQVSLTCDVSGFYPSDIAVEWESDGQPENNYKTTPPVLDSDGSFFLYSKLTVDKSRWEQGDVFSCSVMHEALHNHYTQKSLSLSPGK

SEQ ID NO: 81 - protein, 231 aa, Artificial Sequence; identical to SEQ ID NO: 52
  Description of Artificial Sequence: Synthetic polypeptide
  IL-15/Ralpha x anti-ICOS Backbone 2 Chain 2

SEQ ID NO: 82 - protein, 329 aa, Artificial Sequence; identical to SEQ ID NO: 80
  Description of Artificial Sequence: Synthetic polypeptide
  IL-15/Ralpha x anti-ICOS Backbone 3 Chain 1

SEQ ID NO: 83 - protein, 329 aa, Artificial Sequence
  Description of Artificial Sequence: Synthetic polypeptide
  IL-15/Ralpha x anti-ICOS Backbone 3 Chain 2
ASTKGPSVFPLAPSSKSTSGGTAALGCLVKDYFPEPVTVSWNSGALTSGVHTFPAVLQSSGLYSLSSVVTVPSSSLGTKTYTCNVNHKPSNTKVDKKVERKSCDKTHTCPRCPAPPVAGPSVFLFPPKPKDTLMISRTPEVTCVVVDVKHEDPEVKFKWYVDGVEVHNAKTKPREEQYNSTYRVVSVLTVLHQDWLNGKEYKCKVSNKALPAPIEKTISKAKGQPREPQVYTLPPSREQMTKNQVKLTCLVKGFYPSDIAVEWESNGQPENNYKTTPPVLDSDGSFFLYSKLTVDKSRWQQGNVFSCSVMHEALHNHYTQKSLSLSPGK

SEQ ID NO: 84 - protein, 107 aa, Artificial Sequence [sequence omitted]

SEQ ID NO: 85 - protein, 106 aa, Artificial Sequence
  Description of Artificial Sequence: Synthetic polypeptide
  Constant Light Chain - Lambda
GQPKAAPSVTLFPPSSEELQANKATLVCLISDFYPGAVTVAWKADSSPVKAGVETTTPSKQSNNKYAASSYLSLTPEQWKSHRSYSCQVTHEGSTVEKTVAPTECS

SEQ ID NO: 86 - protein, 350 aa, Artificial Sequence
  Description of Artificial Sequence: Synthetic polypeptide
  XENP20818 Chain 1 - human_IL15_(GGGGS)1_Fc(216)_IgG1_pI(-) _Isosteric_A_C220S/PVA_/S267K/L368D/K370S
NWVNVISDLKKIEDLIQSMHIDATLYTESDVHPSCKVTAMKCFLLELQVISLESGDASIHDTVENLIILANNSLSSNGNVTESGCKECEELEEKNIKEFLQSFVHIVQMFINTSGGGGSEPKSSDKTHTCPPCPAPPVAGPSVFLFPPKPKDTLMISRTPEVTCVVVDVKHEDPEVKFNWYVDGVEVHNAKTKPREEEYNSTYRVVSVLTVLHQDWLNGKEYKCKVSNKALPAPIEKTISKAKGQPREPQVYTLPPSREEMTKNQVSLTCDVSGFYPSDIAVEWESDGQPENNYKTTPPVLDSDGSFFLYSKLTVDKSRWEQGDVFSCSVMHEALHNHYTQKSLSLSPGK

SEQ ID NO: 87 - protein, 301 aa, Artificial Sequence
  Description of Artificial Sequence: Synthetic polypeptide
  XENP20818 Chain 2 - human_IL15Ralpha(Sushi)_(GGGGS)1_Fc(216) _IgG1_C220S/PVA_/S267K/S364K/E357Q
ITCPPPMSVEHADIWVKSYSLYSRERYICNSGFKRKAGTSSLTECVLNKATNVAHWTTPSLKCIRGGGGSEPKSSDKTHTCPPCPAPPVAGPSVFLFPPKPKDTLMISRTPEVTCVVVDVKHEDPEVKFNWYVDGVEVHNAKTKPREEQYNSTYRVVSVLTVLHQDWLNGKEYKCKVSNKALPAPIEKTISKAKGQPREPQVYTLPPSREQMTKNQVKLTCLVKGFYPSDIAVEWESNGQPENNYKTTPPVLDSDGSFFLYSKLTVDKSRWQQGNVFSCSVMHEALHNHYTQKSLSLSPGK

SEQ ID NO: 88 - protein, 440 aa, Artificial Sequence
  Description of Artificial Sequence: Synthetic polypeptide
  XENP21478 Chain 1 - human_IL15Ralpha(sushi)_(GGGGS)6-human _IL15-Fc(216)_IgG1_pI(-)_Isosteric_A_C220S/PVA _/S267K/L368D/K370S (16478)
ITCPPPMSVEHADIWVKSYSLYSRERYICNSGFKRKAGTSSLTECVLNKATNVAHWTTPSLKCIRGGGGSGGGGSGGGGSGGGGSGGGGSGGGGSNWVNVISDLKKIEDLIQSMHIDATLYTESDVHPSCKVTAMKCFLLELQVISLESGDASIHDTVENLIILANNSLSSNGNVTESGCKECEELEEKNIKEFLQSFVHIVQMFINTSEPKSSDKTHTCPPCPAPPVAGPSVFLFPPKPKDTLMISRTPEVTCVVVDVKHEDPEVKFNWYVDGVEVHNAKTKPREEEYNSTYRVVSVLTVLHQDWLNGKEYKCKVSNKALPAPIEKTISKAKGQPREPQVYTLPPSREEMTKNQVSLTCDVSGFYPSDIAVEWESDGQPENNYKTTPPVLDSDGSFFLYSKLTVDKSRWEQGDVFSCSVMHEALHNHYTQKSLSLSPGK

SEQ ID NO: 89 - protein, 231 aa, Artificial Sequence; identical to SEQ ID NO: 52
  Description of Artificial Sequence: Synthetic polypeptide
  XENP21478 Chain 2 - empty-Fc(216)_IgG1_C220S/PVA _/S267K/S364K/E357Q (8924)

SEQ ID NO: 90 - protein, 435 aa, Artificial Sequence
  Description of Artificial Sequence: Synthetic polypeptide
  XENP021993 Chain 1 - human_IL15Ra(sushi)_(GGGGS)5-human _IL15(single-chain)_Fc(216)_IgG1_pI(-)_Isosteric_A_C220S/PVA _/S267K/L368D/K370S
ITCPPPMSVEHADIWVKSYSLYSRERYICNSGFKRKAGTSSLTECVLNKATNVAHWTTPSLKCIRGGGGSGGGGSGGGGSGGGGSGGGGSNWVNVISDLKKIEDLIQSMHIDATLYTESDVHPSCKVTAMKCFLLELQVISLESGDASIHDTVENLIILANNSLSSNGNVTESGCKECEELEEKNIKEFLQSFVHIVQMFINTSEPKSSDKTHTCPPCPAPPVAGPSVFLFPPKPKDTLMISRTPEVTCVVVDVKHEDPEVKFNWYVDGVEVHNAKTKPREEEYNSTYRVVSVLTVLHQDWLNGKEYKCKVSNKALPAPIEKTISKAKGQPREPQVYTLPPSREEMTKNQVSLTCDVSGFYPSDIAVEWESDGQPENNYKTTPPVLDSDGSFFLYSKLTVDKSRWEQGDVFSCSVMHEALHNHYTQKSLSLSPGK

SEQ ID NO: 91 - protein, 231 aa, Artificial Sequence; identical to SEQ ID NO: 52
  Description of Artificial Sequence: Synthetic polypeptide
  XENP021993 Chain 2 - empty_Fc(216)_IgG1_C220S/PVA _/S267K/S364K/E357Q

SEQ ID NO: 92 - protein, 114 aa, Artificial Sequence; identical to SEQ ID NO: 2
  Description of Artificial Sequence: Synthetic polypeptide
  XENP21479 Chain 1 - human_IL15_no_tag (16484)

SEQ ID NO: 93 - protein, 231 aa, Artificial Sequence; identical to SEQ ID NO: 53
  Description of Artificial Sequence: Synthetic polypeptide
  XENP21479 Chain 2 - empty-Fc(216)_IgG1_pI(-)_Isosteric_A _C220S/PVA_/S267K/L368D/K370S (8793)

SEQ ID NO: 94 - protein, 296 aa, Artificial Sequence
  Description of Artificial Sequence: Synthetic polypeptide
  XENP21479 Chain 3 - human_IL15Ralpha(Sushi)-Fc(216)_IgG1 _C220S/PVA_/S267K/S364K/E357Q (16481)
ITCPPPMSVEHADIWVKSYSLYSRERYICNSGFKRKAGTSSLTECVLNKATNVAHWTTPSLKCIREPKSSDKTHTCPPCPAPPVAGPSVFLFPPKPKDTLMISRTPEVTCVVVDVKHEDPEVKFNWYVDGVEVHNAKTKPREEQYNSTYRVVSVLTVLHQDWLNGKEYKCKVSNKALPAPIEKTISKAKGQPREPQVYTLPPSREQMTKNQVKLTCLVKGFYPSDIAVEWESNGQPENNYKTTPPVLDSDGSFFLYSKLTVDKSRWQQGNVFSCSVMHEALHNHYTQKSLSLSPGK

SEQ ID NO: 95 - protein, 114 aa, Artificial Sequence
  Description of Artificial Sequence: Synthetic polypeptide
  N1D
DWVNVISDLKKIEDLIQSMHIDATLYTESDVHPSCKVTAMKCFLLELQVISLESGDASIHDTVENLIILANNSLSSNGNVTESGCKECEELEEKNIKEFLQSFVHIVQMFINTS

SEQ ID NO: 96 - protein, 114 aa, Artificial Sequence
  Description of Artificial Sequence: Synthetic polypeptide
  N4D
NWVDVISDLKKIEDLIQSMHIDATLYTESDVHPSCKVTAMKCFLLELQVISLESGDASIHDTVENLIILANNSLSSNGNVTESGCKECEELEEKNIKEFLQSFVHIVQMFINTS

SEQ ID NO: 97 - protein, 114 aa, Artificial Sequence
  Description of Artificial Sequence: Synthetic polypeptide
  D8N
NWVNVISNLKKIEDLIQSMHIDATLYTESDVHPSCKVTAMKCFLLELQVISLESGDASIHDTVENLIILANNSLSSNGNVTESGCKECEELEEKNIKEFLQSFVHIVQMFINTS

SEQ ID NO: 98 - protein, 114 aa, Artificial Sequence
  Description of Artificial Sequence: Synthetic polypeptide
  D30N
NWVNVISDLKKIEDLIQSMHIDATLYTESNVHPSCKVTAMKCFLLELQVISLESGDASIHDTVENLIILANNSLSSNGNVTESGCKECEELEEKNIKEFLQSFVHIVQMFINTS

SEQ ID NO: 99 - protein, 114 aa, Artificial Sequence
  Description of Artificial Sequence: Synthetic polypeptide
  D61N
NWVNVISDLKKIEDLIQSMHIDATLYTESDVHPSCKVTAMKCFLLELQVISLESGDASIHNTVENLIILANNSLSSNGNVTESGCKECEELEEKNIKEFLQSFVHIVQMFINTS

SEQ ID NO: 100 - protein, 114 aa, Artificial Sequence
  Description of Artificial Sequence: Synthetic polypeptide
  E64Q
NWVNVISDLKKIEDLIQSMHIDATLYTESDVHPSCKVTAMKCFLLELQVISLESGDASIHDTVQNLIILANNSLSSNGNVTESGCKECEELEEKNIKEFLQSFVHIVQMFINTS

SEQ ID NO: 101 - protein, 114 aa, Artificial Sequence
  Description of Artificial Sequence: Synthetic polypeptide
  N65D
NWVNVISDLKKIEDLIQSMHIDATLYTESDVHPSCKVTAMKCFLLELQVISLESGDASIHDTVEDLIILANNSLSSNGNVTESGCKECEELEEKNIKEFLQSFVHIVQMFINTS

SEQ ID NO: 102 - protein, 114 aa, Artificial Sequence
  Description of Artificial Sequence: Synthetic polypeptide
  Q108E
NWVNVISDLKKIEDLIQSMHIDATLYTESDVHPSCKVTAMKCFLLELQVISLESGDASIHDTVENLIILANNSLSSNGNVTESGCKECEELEEKNIKEFLQSFVHIVEMFINTS

SEQ ID NO: 103 - protein, 114 aa, Artificial Sequence
  Description of Artificial Sequence: Synthetic polypeptide
  N1D/D61N
DWVNVISDLKKIEDLIQSMHIDATLYTESDVHPSCKVTAMKCFLLELQVISLESGDASIHNTVENLIILANNSLSSNGNVTESGCKECEELEEKNIKEFLQSFVHIVQMFINTS

SEQ ID NO: 104 - protein, 114 aa, Artificial Sequence
  Description of Artificial Sequence: Synthetic polypeptide
  N1D/E64Q
DWVNVISDLKKIEDLIQSMHIDATLYTESDVHPSCKVTAMKCFLLELQVISLESGDASIHDTVQNLIILANNSLSSNGNVTESGCKECEELEEKNIKEFLQSFVHIVQMFINTS

SEQ ID NO: 105 - protein, 114 aa, Artificial Sequence
  Description of Artificial Sequence: Synthetic polypeptide
  N4D/D61N
NWVDVISDLKKIEDLIQSMHIDATLYTESDVHPSCKVTAMKCFLLELQVISLESGDASIHNTVENLIILANNSLSSNGNVTESGCKECEELEEKNIKEFLQSFVHIVQMFINTS

SEQ ID NO: 106 - protein, 114 aa, Artificial Sequence
  Description of Artificial Sequence: Synthetic polypeptide
  N4D/E64Q
NWVDVISDLKKIEDLIQSMHIDATLYTESDVHPSCKVTAMKCFLLELQVISLESGDASIHDTVQNLIILANNSLSSNGNVTESGCKECEELEEKNIKEFLQSFVHIVQMFINTS

SEQ ID NO: 107 - protein, 114 aa, Artificial Sequence
  Description of Artificial Sequence: Synthetic polypeptide
  D8N/D61N
NWVNVISNLKKIEDLIQSMHIDATLYTESDVHPSCKVTAMKCFLLELQVISLESGDASIHNTVENLIILANNSLSSNGNVTESGCKECEELEEKNIKEFLQSFVHIVQMFINTS

SEQ ID NO: 108 - protein, 114 aa, Artificial Sequence
  Description of Artificial Sequence: Synthetic polypeptide
  D8N/E64Q
NWVNVISNLKKIEDLIQSMHIDATLYTESDVHPSCKVTAMKCFLLELQVISLESGDASIHDTVQNLIILANNSLSSNGNVTESGCKECEELEEKNIKEFLQSFVHIVQMFINTS

SEQ ID NO: 109 - protein, 114 aa, Artificial Sequence
  Description of Artificial Sequence: Synthetic polypeptide
  D61N/E64Q
NWVNVISDLKKIEDLIQSMHIDATLYTESDVHPSCKVTAMKCFLLELQVISLESGDASIHNTVQNLIILANNSLSSNGNVTESGCKECEELEEKNIKEFLQSFVHIVQMFINTS

SEQ ID NO: 110 - protein, 114 aa, Artificial Sequence
  Description of Artificial Sequence: Synthetic polypeptide
  E64Q/Q108E
NWVNVISDLKKIEDLIQSMHIDATLYTESDVHPSCKVTAMKCFLLELQVISLESGDASIHDTVQNLIILANNSLSSNGNVTESGCKECEELEEKNIKEFLQSFVHIVEMFINTS

SEQ ID NO: 111 - protein, 114 aa, Artificial Sequence
  Description of Artificial Sequence: Synthetic polypeptide
  N1D/N4D/D8N
DWVDVISNLKKIEDLIQSMHIDATLYTESDVHPSCKVTAMKCFLLELQVISLESGDASIHDTVENLIILANNSLSSNGNVTESGCKECEELEEKNIKEFLQSFVHIVQMFINTS

SEQ ID NO: 112 - protein, 114 aa, Artificial Sequence
  Description of Artificial Sequence: Synthetic polypeptide
  D61N/E64Q/N65D
NWVNVISDLKKIEDLIQSMHIDATLYTESDVHPSCKVTAMKCFLLELQVISLESGDASIHNTVQDLIILANNSLSSNGNVTESGCKECEELEEKNIKEFLQSFVHIVQMFINTS

SEQ ID NO: 113 - protein, 114 aa, Artificial Sequence
  Description of Artificial Sequence: Synthetic polypeptide
  N1D/D61N/E64Q/Q108E
DWVNVISDLKKIEDLIQSMHIDATLYTESDVHPSCKVTAMKCFLLELQVISLESGDASIHNTVQNLIILANNSLSSNGNVTESGCKECEELEEKNIKEFLQSFVHIVEMFINTS

SEQ ID NO: 114 - protein, 114 aa, Artificial Sequence
  Description of Artificial Sequence: Synthetic polypeptide
  N4D/D61N/E64Q/Q108E
NWVDVISDLKKIEDLIQSMHIDATLYTESDVHPSCKVTAMKCFLLELQVISLESGDASIHNTVQNLIILANNSLSSNGNVTESGCKECEELEEKNIKEFLQSFVHIVEMFINTS

SEQ ID NO: 115 - protein, 114 aa, Artificial Sequence
  Description of Artificial Sequence: Synthetic polypeptide
  N1D/N65D
DWVNVISDLKKIEDLIQSMHIDATLYTESDVHPSCKVTAMKCFLLELQVISLESGDASIHDTVEDLIILANNSLSSNGNVTESGCKECEELEEKNIKEFLQSFVHIVQMFINTS

SEQ ID NO: 116 - protein, 114 aa, Artificial Sequence
  Description of Artificial Sequence: Synthetic polypeptide
  N1D/Q108E
DWVNVISDLKKIEDLIQSMHIDATLYTESDVHPSCKVTAMKCFLLELQVISLESGDASIHDTVENLIILANNSLSSNGNVTESGCKECEELEEKNIKEFLQSFVHIVEMFINTS

SEQ ID NO: 117 - protein, 114 aa, Artificial Sequence
  Description of Artificial Sequence: Synthetic polypeptide
  N4D/N65D
NWVDVISDLKKIEDLIQSMHIDATLYTESDVHPSCKVTAMKCFLLELQVISLESGDASIHDTVEDLIILANNSLSSNGNVTESGCKECEELEEKNIKEFLQSFVHIVQMFINTS

SEQ ID NO: 118 - protein, 114 aa, Artificial Sequence
  Description of Artificial Sequence: Synthetic polypeptide
  N1D/D30N
DWVNVISDLKKIEDLIQSMHIDATLYTESNVHPSCKVTAMKCFLLELQVISLESGDASIHDTVENLIILANNSLSSNGNVTESGCKECEELEEKNIKEFLQSFVHIVQMFINTS

SEQ ID NO: 119 - protein, 114 aa, Artificial Sequence
  Description of Artificial Sequence: Synthetic polypeptide
  N4D/D30N
NWVDVISDLKKIEDLIQSMHIDATLYTESNVHPSCKVTAMKCFLLELQVISLESGDASIHDTVENLIILANNSLSSNGNVTESGCKECEELEEKNIKEFLQSFVHIVQMFINTS

SEQ ID NO: 120 - protein, 114 aa, Artificial Sequence
  Description of Artificial Sequence: Synthetic polypeptide
  D30N/E64Q
NWVNVISDLKKIEDLIQSMHIDATLYTESNVHPSCKVTAMKCFLLELQVISLESGDASIHDTVQNLIILANNSLSSNGNVTESGCKECEELEEKNIKEFLQSFVHIVQMFINTS

SEQ ID NO: 121 - protein, 114 aa, Artificial Sequence
  Description of Artificial Sequence: Synthetic polypeptide
  D30N/N65D
NWVNVISDLKKIEDLIQSMHIDATLYTESNVHPSCKVTAMKCFLLELQVISLESGDASIHDTVEDLIILANNSLSSNGNVTESGCKECEELEEKNIKEFLQSFVHIVQMFINTS

SEQ ID NO: 122 - protein, 114 aa, Artificial Sequence
  Description of Artificial Sequence: Synthetic polypeptide
  D30N/Q108E
NWVNVISDLKKIEDLIQSMHIDATLYTESNVHPSCKVTAMKCFLLELQVISLESGDASIHDTVENLIILANNSLSSNGNVTESGCKECEELEEKNIKEFLQSFVHIVEMFINTS

SEQ ID NO: 123 - protein, 114 aa, Artificial Sequence
  Description of Artificial Sequence: Synthetic polypeptide
  N65D/Q108E
NWVNVISDLKKIEDLIQSMHIDATLYTESDVHPSCKVTAMKCFLLELQVISLESGDASIHDTVEDLIILANNSLSSNGNVTESGCKECEELEEKNIKEFLQSFVHIVEMFINTS

SEQ ID NO: 124 - protein, 114 aa, Artificial Sequence
  Description of Artificial Sequence: Synthetic polypeptide
  E64Q/N65D
NWVNVISDLKKIEDLIQSMHIDATLYTESDVHPSCKVTAMKCFLLELQVISLESGDASIHDTVQDLIILANNSLSSNGNVTESGCKECEELEEKNIKEFLQSFVHIVQMFINTS

SEQ ID NO: 125 - protein, 114 aa, Artificial Sequence
  Description of Artificial Sequence: Synthetic polypeptide
  N1D/N4D/N65D
DWVDVISDLKKIEDLIQSMHIDATLYTESDVHPSCKVTAMKCFLLELQVISLESGDASIHDTVEDLIILANNSLSSNGNVTESGCKECEELEEKNIKEFLQSFVHIVQMFINTS

SEQ ID NO: 126 - protein, 114 aa, Artificial Sequence
  Description of Artificial Sequence: Synthetic polypeptide
  D30N/E64Q/N65D
NWVNVISDLKKIEDLIQSMHIDATLYTESNVHPSCKVTAMKCFLLELQVISLESGDASIHDTVQDLIILANNSLSSNGNVTESGCKECEELEEKNIKEFLQSFVHIVQMFINTS

SEQ ID NO: 127 - protein, 114 aa, Artificial Sequence
  Description of Artificial Sequence: Synthetic polypeptide
  N4D/D61N/N65D
NWVDVISDLKKIEDLIQSMHIDATLYTESDVHPSCKVTAMKCFLLELQVISLESGDASIHNTVEDLIILANNSLSSNGNVTESGCKECEELEEKNIKEFLQSFVHIVQMFINTS

SEQ ID NO: 128 - protein, 114 aa, Artificial Sequence
  Description of Artificial Sequence: Synthetic polypeptide
  V49R
NWVNVISDLKKIEDLIQSMHIDATLYTESDVHPSCKVTAMKCFLLELQRISLESGDASIHDTVENLIILANNSLSSNGNVTESGCKECEELEEKNIKEFLQSFVHIVQMFINTS

SEQ ID NO: 129 - protein, 114 aa, Artificial Sequence
  Description of Artificial Sequence: Synthetic polypeptide
  N1G/D30N/E46G/V49R/E64Q
GWVNVISDLKKIEDLIQSMHIDATLYTESNVHPSCKVTAMKCFLLGLQRISLESGDASIHDTVQNLIILANNSLSSNGNVTESGCKECEELEEKNIKEFLQSFVHIVQMFINTS

SEQ ID NO: 130 - protein, 114 aa, Artificial Sequence
  Description of Artificial Sequence: Synthetic polypeptide
  N1A/D30N/E46G/V49R
AWVNVISDLKKIEDLIQSMHIDATLYTESNVHPSCKVTAMKCFLLGLQRISLESGDASIHDTVENLIILANNSLSSNGNVTESGCKECEELEEKNIKEFLQSFVHIVQMFINTS

SEQ ID NO: 131 - protein, 114 aa, Artificial Sequence
  Description of Artificial Sequence: Synthetic polypeptide
  D22N/Y26F/E46Q/E53Q/E89Q/E93Q
NWVNVISDLKKIEDLIQSMHINATLFTESDVHPSCKVTAMKCFLLQLQVISLQSGDASIHDTVENLIILANNSLSSNGNVTESGCKECQELEQKNIKEFLQSFVHIVQMFINTS

SEQ ID NO: 132 - protein, 435 aa, Artificial Sequence
  Description of Artificial Sequence: Synthetic polypeptide
  XENP29281 Chain 1 - human_IL15Ra(sushi)_(GGGGS)5-human_IL15 _D30N_(single-Chain)-Fc(216)_IgG1_pI(-)_Isosteric_A_C220S/PVA _/S267K/L368D/K370S
ITCPPPMSVEHADIWVKSYSLYSRERYICNSGFKRKAGTSSLTECVLNKATNVAHWTTPSLKCIRGGGGSGGGGSGGGGSGGGGSGGGGSNWVNVISDLKKIEDLIQSMHIDATLYTESNVHPSCKVTAMKCFLLELQVISLESGDASIHDTVENLIILANNSLSSNGNVTESGCKECEELEEKNIKEFLQSFVHIVQMFINTSEPKSSDKTHTCPPCPAPPVAGPSVFLFPPKPKDTLMISRTPEVTCVVVDVKHEDPEVKFNWYVDGVEVHNAKTKPREEEYNSTYRVVSVLTVLHQDWLNGKEYKCKVSNKALPAPIEKTISKAKGQPREPQVYTLPPSREEMTKNQVSLTCDVSGFYPSDIAVEWESDGQPENNYKTTPPVLDSDGSFFLYSKLTVDKSRWEQGDVFSCSVMHEALHNHYTQKSLSLSPGK

SEQ ID NO: 133 - protein, 231 aa, Artificial Sequence; identical to SEQ ID NO: 52
  Description of Artificial Sequence: Synthetic polypeptide
  XENP29281 Chain 2 - empty-Fc(216)_IgG1_C220S/PVA _/S267K/S364K/E357Q

SEQ ID NO: 134 - protein, 435 aa, Artificial Sequence
  Description of Artificial Sequence: Synthetic polypeptide
  XENP24050 Chain 1 - human_IL15Ra(sushi)_(GGGGS)5-human_IL15 _N4D/N65D_(single-Chain)-Fc(216)_IgG1_pI(-)_Isosteric_A _C220S/PVA_/S267K/L368D/K370S
ITCPPPMSVEHADIWVKSYSLYSRERYICNSGFKRKAGTSSLTECVLNKATNVAHWTTPSLKCIRGGGGSGGGGSGGGGSGGGGSGGGGSNWVDVISDLKKIEDLIQSMHIDATLYTESDVHPSCKVTAMKCFLLELQVISLESGDASIHDTVEDLIILANNSLSSNGNVTESGCKECEELEEKNIKEFLQSFVHIVQMFINTSEPKSSDKTHTCPPCPAPPVAGPSVFLFPPKPKDTLMISRTPEVTCVVVDVKHEDPEVKFNWYVDGVEVHNAKTKPREEEYNSTYRVVSVLTVLHQDWLNGKEYKCKVSNKALPAPIEKTISKAKGQPREPQVYTLPPSREEMTKNQVSLTCDVSGFYPSDIAVEWESDGQPENNYKTTPPVLDSDGSFFLYSKLTVDKSRWEQGDVFSCSVMHEALHNHYTQKSLSLSPGK

SEQ ID NO: 135 - protein, 231 aa, Artificial Sequence; identical to SEQ ID NO: 52
  Description of Artificial Sequence: Synthetic polypeptide
  XENP24050 Chain 2 - empty-Fc(216)_IgG1_C220S/PVA _/S267K/S364K/E357Q

SEQ ID NO: 136 - protein, 435 aa, Artificial Sequence
  Description of Artificial Sequence: Synthetic polypeptide
  XENP29285 Chain 1 - human_IL15Ra(sushi)_(GGGGS)5-human_IL15 _D30N/N65D_(single-Chain)-Fc(216)_IgG1_pI(-)_Isosteric_A _C220S/PVA_/S267K/L368D/K370S
ITCPPPMSVEHADIWVKSYSLYSRERYICNSGFKRKAGTSSLTECVLNKATNVAHWTTPSLKCIRGGGGSGGGGSGGGGSGGGGSGGGGSNWVNVISDLKKIEDLIQSMHIDATLYTESNVHPSCKVTAMKCFLLELQVISLESGDASIHDTVEDLIILANNSLSSNGNVTESGCKECEELEEKNIKEFLQSFVHIVQMFINTSEPKSSDKTHTCPPCPAPPVAGPSVFLFPPKPKDTLMISRTPEVTCVVVDVKHEDPEVKFNWYVDGVEVHNAKTKPREEEYNSTYRVVSVLTVLHQDWLNGKEYKCKVSNKALPAPIEKTISKAKGQPREPQVYTLPPSREEMTKNQVSLTCDVSGFYPSDIAVEWESDGQPENNYKTTPPVLDSDGSFFLYSKLTVDKSRWEQGDVFSCSVMHEALHNHYTQKSLSLSPGK

SEQ ID NO: 137 - protein, 231 aa, Artificial Sequence; identical to SEQ ID NO: 52
  Description of Artificial Sequence: Synthetic polypeptide
  XENP29285 Chain 2 - empty-Fc(216)_IgG1_C220S/PVA _/S267K/S364K/E357Q

SEQ ID NO: 138 - protein, 435 aa, Artificial Sequence
  Description of Artificial Sequence: Synthetic polypeptide
  XENP29286 Chain 1 - human_IL15Ra(sushi)_(GGGGS)5-human_IL15 _D30N/E64Q/N65D_(single-Chain)-Fc(216)_IgG1_pI(-)_Isosteric_A _C220S/PVA_/S267K/L368D/K370S
ITCPPPMSVEHADIWVKSYSLYSRERYICNSGFKRKAGTSSLTECVLNKATNVAHWTTPSLKCIRGGGGSGGGGSGGGGSGGGGSGGGGSNWVNVISDLKKIEDLIQSMHIDATLYTESNVHPSCKVTAMKCFLLELQVISLESGDASIHDTVQDLIILANNSLSSNGNVTESGCKECEELEEKNIKEFLQSFVHIVQMFINTSEPKSSDKTHTCPPCPAPPVAGPSVFLFPPKPKDTLMISRTPEVTCVVVDVKHEDPEVKFNWYVDGVEVHNAKTKPREEEYNSTYRVVSVLTVLHQDWLNGKEYKCKVSNKALPAPIEKTISKAKGQPREPQVYTLPPSREEMTKNQVSLTCDVSGFYPSDIAVEWESDGQPENNYKTTPPVLDSDGSFFLYSKLTVDKSRWEQGDVFSCSVMHEALHNHYTQKSLSLSPGK

SEQ ID NO: 139 - protein, 231 aa, Artificial Sequence; identical to SEQ ID NO: 52
  Description of Artificial Sequence: Synthetic polypeptide
  XENP29286 Chain 2 - empty-Fc(216)_IgG1_pI(-)_Isosteric_A _C220S/PVA_/S267K/L368D/K370S

SEQ ID NO: 140 - protein, 125 aa, Artificial Sequence
  Description of Artificial Sequence: Synthetic polypeptide
  [ICOS]_H0 Variable Heavy
QVQLVQSGAEVKKPGASVKVSCKASGYTFTGYYMHWVRQAPGQGLEWMGWINPHSGGTNYAQKFQGRVTMTRDTSISTAYMELSRLRSDDTAVYYCARTYYYDSSGYYHDAFDIWGQGTMVTVSS

SEQ ID NO: 141 - protein, 107 aa, Artificial Sequence
  Description of Artificial Sequence: Synthetic polypeptide
  [ICOS]_L0 Variable Light
DIQMTQSPSSVSASVGDRVTITCRASQGISRLLAWYQQKPGKAPKLLIYVASSLQSGVPSRFSGSGSGTDFTLTISSLQPEDFATYYCQQANSFPWTFGQGTKVEIK

SEQ ID NO: 142 - protein, 125 aa, Artificial Sequence
  Description of Artificial Sequence: Synthetic polypeptide
  [ICOS]_H0.66 Variable Heavy
QVQLVQSGAEVKKPGASVKVSCKASGYTFTGYYMHWVRQAPGQGLEWMGWINPHSGETIYAQKFQGRVTMTRDTSISTAYMELSSLRSEDTAVYYCARTYYYDTSGYYHDAFDVWGQGTMVTVSS

SEQ ID NO: 143 - protein, 107 aa, Artificial Sequence; identical to SEQ ID NO: 141
  Description of Artificial Sequence: Synthetic polypeptide
  [ICOS]_L0 Variable Light

SEQ ID NO: 144 - protein, 435 aa, Artificial Sequence; identical to SEQ ID NO: 134
  Description of Artificial Sequence: Synthetic polypeptide
  XENP29975 Chain 1 -  human_IL15Ra(sushi)_(GGGGS)5-human _IL15(N4D/N65D;single-chain)_Fc(216)_IgG1_pI(-)_Isosteric_A _C220S/PVA_/S267K/L368D/K370S

SEQ ID NO: 145 - protein, 454 aa, Artificial Sequence
  Description of Artificial Sequence: Synthetic polypeptide
  XENP29975 Chain 2 -  [aICOS]_H0.66_IgG1_PVA_/S267K/S364K/E357Q
QVQLVQSGAEVKKPGASVKVSCKASGYTFTGYYMHWVRQAPGQGLEWMGWINPHSGETIYAQKFQGRVTMTRDTSISTAYMELSSLRSEDTAVYYCARTYYYDTSGYYHDAFDVWGQGTMVTVSSASTKGPSVFPLAPSSKSTSGGTAALGCLVKDYFPEPVTVSWNSGALTSGVHTFPAVLQSSGLYSLSSVVTVPSSSLGTQTYICNVNHKPSNTKVDKKVEPKSCDKTHTCPPCPAPPVAGPSVFLFPPKPKDTLMISRTPEVTCVVVDVKHEDPEVKFNWYVDGVEVHNAKTKPREEQYNSTYRVVSVLTVLHQDWLNGKEYKCKVSNKALPAPIEKTISKAKGQPREPQVYTLPPSREQMTKNQVKLTCLVKGFYPSDIAVEWESNGQPENNYKTTPPVLDSDGSFFLYSKLTVDKSRWQQGNVFSCSVMHEALHNHYTQKSLSLSPGK

SEQ ID NO: 146 - protein, 214 aa, Artificial Sequence
  Description of Artificial Sequence: Synthetic polypeptide
  XENP29975 Chain 3 -  [aICOS]_L0 LC
DIQMTQSPSSVSASVGDRVTITCRASQGISRLLAWYQQKPGKAPKLLIYVASSLQSGVPSRFSGSGSGTDFTLTISSLQPEDFATYYCQQANSFPWTFGQGTKVEIKRTVAAPSVFIFPPSDEQLKSGTASVVCLLNNFYPREAKVQWKVDNALQSGNSQESVTEQDSKDSTYSLSSTLTLSKADYEKHKVYACEVTHQGLSSPVTKSFNRGEC

SEQ ID NO: 147 - protein, 435 aa, Artificial Sequence; identical to SEQ ID NO: 136
  Description of Artificial Sequence: Synthetic polypeptide
  XENP29978 Chain 1 -  human_IL15Ra(sushi)_(GGGGS)5-human _IL15(D30N/N65D;single-chain)_Fc(216)_IgG1_pI(-)_Isosteric_A _C220S/PVA_/S267K/L368D/K370S

SEQ ID NO: 148 - protein, 454 aa, Artificial Sequence; identical to SEQ ID NO: 145
  Description of Artificial Sequence: Synthetic polypeptide
  XENP29978 Chain 2 -  [aICOS]_H0.66_IgG1_PVA_/S267K/S364K/E357Q

SEQ ID NO: 149 - protein, 214 aa, Artificial Sequence; identical to SEQ ID NO: 146
  Description of Artificial Sequence: Synthetic polypeptide
  XENP29978 Chain 3 -  [aICOS]_L0 LC

SEQ ID NO: 150 - protein, 435 aa, Artificial Sequence; identical to SEQ ID NO: 138
  Description of Artificial Sequence: Synthetic polypeptide
  XENP30810 Chain 1 -  human_IL15Ra(sushi)_(GGGGS)5-human _IL15(D30N/E64Q/N65D;single-chain)_Fc(216)_IgG1_pI(-)_Isosteric _A_C220S/PVA_/S267K/L368D/K370S

SEQ ID NO: 151 - protein, 454 aa, Artificial Sequence; identical to SEQ ID NO: 145
  Description of Artificial Sequence: Synthetic polypeptide
  XENP30810 Chain 2 -  [alphaICOS]_H0.66_IgG1_PVA _/S267K/S364K/E357Q

SEQ ID NO: 152 - protein, 214 aa, Artificial Sequence; identical to SEQ ID NO: 146
  Description of Artificial Sequence: Synthetic polypeptide
  XENP30810 Chain 3 -  [alphaICOS]_L0

SEQ ID NO: 153 - protein, 435 aa, Artificial Sequence
  Description of Artificial Sequence: Synthetic polypeptide
  XENP30811 Chain 1 -  human_IL15Ra(sushi)_(GGGGS)5-human _IL15(N4D/N65D;single-chain)_Fc(216)_IgG1_pI(-)_Isosteric_A _C220S/PVA_/S267K/L368D/K370S/M428L/N434S
ITCPPPMSVEHADIWVKSYSLYSRERYICNSGFKRKAGTSSLTECVLNKATNVAHWTTPSLKCIRGGGGSGGGGSGGGGSGGGGSGGGGSNWVDVISDLKKIEDLIQSMHIDATLYTESDVHPSCKVTAMKCFLLELQVISLESGDASIHDTVEDLIILANNSLSSNGNVTESGCKECEELEEKNIKEFLQSFVHIVQMFINTSEPKSSDKTHTCPPCPAPPVAGPSVFLFPPKPKDTLMISRTPEVTCVVVDVKHEDPEVKFNWYVDGVEVHNAKTKPREEEYNSTYRVVSVLTVLHQDWLNGKEYKCKVSNKALPAPIEKTISKAKGQPREPQVYTLPPSREEMTKNQVSLTCDVSGFYPSDIAVEWESDGQPENNYKTTPPVLDSDGSFFLYSKLTVDKSRWEQGDVFSCSVLHEALHSHYTQKSLSLSPGK

SEQ ID NO: 154 - protein, 454 aa, Artificial Sequence
  Description of Artificial Sequence: Synthetic polypeptide
  XENP30811 Chain 2 -  [alphaICOS]_H0.66_IgG1_PVA _/S267K/S364K/E357Q/M428L/N434S
QVQLVQSGAEVKKPGASVKVSCKASGYTFTGYYMHWVRQAPGQGLEWMGWINPHSGETIYAQKFQGRVTMTRDTSISTAYMELSSLRSEDTAVYYCARTYYYDTSGYYHDAFDVWGQGTMVTVSSASTKGPSVFPLAPSSKSTSGGTAALGCLVKDYFPEPVTVSWNSGALTSGVHTFPAVLQSSGLYSLSSVVTVPSSSLGTQTYICNVNHKPSNTKVDKKVEPKSCDKTHTCPPCPAPPVAGPSVFLFPPKPKDTLMISRTPEVTCVVVDVKHEDPEVKFNWYVDGVEVHNAKTKPREEQYNSTYRVVSVLTVLHQDWLNGKEYKCKVSNKALPAPIEKTISKAKGQPREPQVYTLPPSREQMTKNQVKLTCLVKGFYPSDIAVEWESNGQPENNYKTTPPVLDSDGSFFLYSKLTVDKSRWQQGNVFSCSVLHEALHSHYTQKSLSLSPGK

SEQ ID NO: 155 - protein, 214 aa, Artificial Sequence; identical to SEQ ID NO: 146
  Description of Artificial Sequence: Synthetic polypeptide
  XENP30811 Chain 3 -  [alphaICOS]_L0

SEQ ID NO: 156 - protein, 435 aa, Artificial Sequence
  Description of Artificial Sequence: Synthetic polypeptide
  XENP30812 Chain 1 -  human_IL15Ra(sushi)_(GGGGS)5-human _IL15(D30N/N65D;single-chain)_Fc(216)_IgG1_pI(-)_Isosteric_A _C220S/PVA_/S267K/L368D/K370S/M428L/N434S
ITCPPPMSVEHADIWVKSYSLYSRERYICNSGFKRKAGTSSLTECVLNKATNVAHWTTPSLKCIRGGGGSGGGGSGGGGSGGGGSGGGGSNWVNVISDLKKIEDLIQSMHIDATLYTESNVHPSCKVTAMKCFLLELQVISLESGDASIHDTVEDLIILANNSLSSNGNVTESGCKECEELEEKNIKEFLQSFVHIVQMFINTSEPKSSDKTHTCPPCPAPPVAGPSVFLFPPKPKDTLMISRTPEVTCVVVDVKHEDPEVKFNWYVDGVEVHNAKTKPREEEYNSTYRVVSVLTVLHQDWLNGKEYKCKVSNKALPAPIEKTISKAKGQPREPQVYTLPPSREEMTKNQVSLTCDVSGFYPSDIAVEWESDGQPENNYKTTPPVLDSDGSFFLYSKLTVDKSRWEQGDVFSCSVLHEALHSHYTQKSLSLSPGK

SEQ ID NO: 157 - protein, 454 aa, Artificial Sequence; identical to SEQ ID NO: 154
  Description of Artificial Sequence: Synthetic polypeptide
  XENP30812 Chain 2 -  [alphaICOS]_H0.66_IgG1_PVA _/S267K/S364K/E357Q/M428L/N434S

SEQ ID NO: 158 - protein, 214 aa, Artificial Sequence; identical to SEQ ID NO: 146
  Description of Artificial Sequence: Synthetic polypeptide
  XENP30812 Chain 3 -  [alphaICOS]_L0

SEQ ID NO: 159 - protein, 435 aa, Artificial Sequence
  Description of Artificial Sequence: Synthetic polypeptide
  XENP30813 Chain 1 -  human_IL15Ra(sushi)_(GGGGS)5-human _IL15(D30N/E64Q/N65D;single-chain)_Fc(216)_IgG1_pI(-)_Isosteric _A_C220S/PVA_/S267K/L368D/K370S/M428L/N434S
ITCPPPMSVEHADIWVKSYSLYSRERYICNSGFKRKAGTSSLTECVLNKATNVAHWTTPSLKCIRGGGGSGGGGSGGGGSGGGGSGGGGSNWVNVISDLKKIEDLIQSMHIDATLYTESNVHPSCKVTAMKCFLLELQVISLESGDASIHDTVQDLIILANNSLSSNGNVTESGCKECEELEEKNIKEFLQSFVHIVQMFINTSEPKSSDKTHTCPPCPAPPVAGPSVFLFPPKPKDTLMISRTPEVTCVVVDVKHEDPEVKFNWYVDGVEVHNAKTKPREEEYNSTYRVVSVLTVLHQDWLNGKEYKCKVSNKALPAPIEKTISKAKGQPREPQVYTLPPSREEMTKNQVSLTCDVSGFYPSDIAVEWESDGQPENNYKTTPPVLDSDGSFFLYSKLTVDKSRWEQGDVFSCSVLHEALHSHYTQKSLSLSPGK

SEQ ID NO: 160 - protein, 454 aa, Artificial Sequence; identical to SEQ ID NO: 154
  Description of Artificial Sequence: Synthetic polypeptide
  XENP30813 Chain 2 -  [alphaICOS]_H0.66_IgG1_PVA _/S267K/S364K/E357Q/M428L/N434S

SEQ ID NO: 161 - protein, 214 aa, Artificial Sequence; identical to SEQ ID NO: 146
  Description of Artificial Sequence: Synthetic polypeptide
  XENP30813 Chain 3 -  [alphaICOS]_L0

SEQ ID NO: 162 - protein, 435 aa, Artificial Sequence; identical to SEQ ID NO: 134
  Description of Artificial Sequence: Synthetic polypeptide
  XENP26007 Chain 1 - human_IL15Ra(sushi)_(GGGGS)5-human _IL15(N4D/N65D;single-Chain)_Fc(216)_IgG1_pI(-)_Isosteric_A _C220S/PVA_/S267K/L368D/K370S scIL-15/Ralpha-Fc Chain

SEQ ID NO: 163 - protein, 449 aa, Artificial Sequence
  Description of Artificial Sequence: Synthetic polypeptide
  XENP26007 Chain 2 - Numax_IgG1_PVA _/S267K/S364K/E357Q Heavy Chain
QVTLRESGPALVKPTQTLTLTCTFSGFSLSTAGMSVGWIRQPPGKALEWLADIWWDDKKHYNPSLKDRLTISKDTSKNQVVLKVTNMDPADTATYYCARDMIFNFYFDVWGQGTTVTVSSASTKGPSVFPLAPSSKSTSGGTAALGCLVKDYFPEPVTVSWNSGALTSGVHTFPAVLQSSGLYSLSSVVTVPSSSLGTQTYICNVNHKPSNTKVDKKVEPKSCDKTHTCPPCPAPPVAGPSVFLFPPKPKDTLMISRTPEVTCVVVDVKHEDPEVKFNWYVDGVEVHNAKTKPREEQYNSTYRVVSVLTVLHQDWLNGKEYKCKVSNKALPAPIEKTISKAKGQPREPQVYTLPPSREQMTKNQVKLTCLVKGFYPSDIAVEWESNGQPENNYKTTPPVLDSDGSFFLYSKLTVDKSRWQQGNVFSCSVMHEALHNHYTQKSLSLSPGK

SEQ ID NO: 164 - protein, 213 aa, Artificial Sequence
  Description of Artificial Sequence: Synthetic polypeptide
  XENP26007 Chain 3 - Numax Light Chain
DIQMTQSPSTLSASVGDRVTITCSASSRVGYMHWYQQKPGKAPKLLIYDTSKLASGVPSRFSGSGSGTEFTLTISSLQPDDFATYYCFQGSGYPFTFGGGTKVEIKRTVAAPSVFIFPPSDEQLKSGTASVVCLLNNFYPREAKVQWKVDNALQSGNSQESVTEQDSKDSTYSLSSTLTLSKADYEKHKVYACEVTHQGLSSPVTKSFNRGEC

SEQ ID NO: 165 - protein, 435 aa, Artificial Sequence; identical to SEQ ID NO: 136
  Description of Artificial Sequence: Synthetic polypeptide
  XENP29481 Chain 1 -  human_IL15Ra(sushi)_(GGGGS)5-human _IL15(D30N/N65D;single-chain)_Fc(216)_IgG1_pI(-)_Isosteric_A _C220S/PVA_/S267K/L368D/K370S

SEQ ID NO: 166 - protein, 449 aa, Artificial Sequence; identical to SEQ ID NO: 163
  Description of Artificial Sequence: Synthetic polypeptide
  XENP29481 Chain 2 -  Numax_IgG1_PVA_/S267K/S364K/E357Q

SEQ ID NO: 167 - protein, 213 aa, Artificial Sequence; identical to SEQ ID NO: 164
  Description of Artificial Sequence: Synthetic polypeptide
  XENP29481 Chain 3 -  Numax LC

SEQ ID NO: 168 - protein, 435 aa, Artificial Sequence; identical to SEQ ID NO: 138
  Description of Artificial Sequence: Synthetic polypeptide
  XENP30432 Chain 1 -  human_IL15Ra(sushi)_(GGGGS)5-human _IL15(D30N/E64Q/N65D;single-chain)_Fc(216)_IgG1_pI(-)_Isosteric _A_C220S/PVA_/S267K/L368D/K370S

SEQ ID NO: 169 - protein, 449 aa, Artificial Sequence; identical to SEQ ID NO: 163
  Description of Artificial Sequence: Synthetic polypeptide
  XENP30432 Chain 2 -  Numax_VH_IgG1_IgG1_PVA_/S267K/S364K/E357Q

SEQ ID NO: 170 - protein, 213 aa, Artificial Sequence; identical to SEQ ID NO: 164
  Description of Artificial Sequence: Synthetic polypeptide
  XENP30432 Chain 3 -  Numax LC

SEQ ID NO: 171 - protein, 350 aa, Artificial Sequence
  Description of Artificial Sequence: Synthetic polypeptide
  XENP22853 Chain 1 - human_IL15_(GGGGS)1-Fc(216)_IgG1_pI(-) _Isosteric_A_C220S/PVA_/S267K/L368D/K370S/M428L/N434S
NWVNVISDLKKIEDLIQSMHIDATLYTESDVHPSCKVTAMKCFLLELQVISLESGDASIHDTVENLIILANNSLSSNGNVTESGCKECEELEEKNIKEFLQSFVHIVQMFINTSGGGGSEPKSSDKTHTCPPCPAPPVAGPSVFLFPPKPKDTLMISRTPEVTCVVVDVKHEDPEVKFNWYVDGVEVHNAKTKPREEEYNSTYRVVSVLTVLHQDWLNGKEYKCKVSNKALPAPIEKTISKAKGQPREPQVYTLPPSREEMTKNQVSLTCDVSGFYPSDIAVEWESDGQPENNYKTTPPVLDSDGSFFLYSKLTVDKSRWEQGDVFSCSVLHEALHSHYTQKSLSLSPGK

SEQ ID NO: 172 - protein, 301 aa, Artificial Sequence
  Description of Artificial Sequence: Synthetic polypeptide
  XENP22853 Chain 2 - human_IL15Ra(Sushi)_(GGGGS)1-Fc(216)_IgG1 _C220S/PVA_/S267K/S364K/E357Q/M428L/N434S
ITCPPPMSVEHADIWVKSYSLYSRERYICNSGFKRKAGTSSLTECVLNKATNVAHWTTPSLKCIRGGGGSEPKSSDKTHTCPPCPAPPVAGPSVFLFPPKPKDTLMISRTPEVTCVVVDVKHEDPEVKFNWYVDGVEVHNAKTKPREEQYNSTYRVVSVLTVLHQDWLNGKEYKCKVSNKALPAPIEKTISKAKGQPREPQVYTLPPSREQMTKNQVKLTCLVKGFYPSDIAVEWESNGQPENNYKTTPPVLDSDGSFFLYSKLTVDKSRWQQGNVFSCSVLHEALHSHYTQKSLSLSPGK

SEQ ID NO: 173 - protein, 350 aa, Artificial Sequence
  Description of Artificial Sequence: Synthetic polypeptide
  XENP24113 Chain 1 - human_IL15_N4D/N65D_(GGGGS)1-Fc(216)_IgG1 _pI(-)_Isosteric_A_C220S/PVA_/S267K/L368D/K370S/M428L/N434S
NWVDVISDLKKIEDLIQSMHIDATLYTESDVHPSCKVTAMKCFLLELQVISLESGDASIHDTVEDLIILANNSLSSNGNVTESGCKECEELEEKNIKEFLQSFVHIVQMFINTSGGGGSEPKSSDKTHTCPPCPAPPVAGPSVFLFPPKPKDTLMISRTPEVTCVVVDVKHEDPEVKFNWYVDGVEVHNAKTKPREEEYNSTYRVVSVLTVLHQDWLNGKEYKCKVSNKALPAPIEKTISKAKGQPREPQVYTLPPSREEMTKNQVSLTCDVSGFYPSDIAVEWESDGQPENNYKTTPPVLDSDGSFFLYSKLTVDKSRWEQGDVFSCSVLHEALHSHYTQKSLSLSPGK

SEQ ID NO: 174 - protein, 301 aa, Artificial Sequence; identical to SEQ ID NO: 172
  Description of Artificial Sequence: Synthetic polypeptide
  XENP24113 Chain 2 - human_IL15Ra(Sushi)_(GGGGS)1-Fc(216)_IgG1 _C220S/PVA_/S267K/S364K/E357Q/M428L/N434S

SEQ ID NO: 175 - protein, 435 aa, Artificial Sequence; identical to SEQ ID NO: 153
  Description of Artificial Sequence: Synthetic polypeptide
  XENP24294 Chain 1 - human_IL15Ra(sushi)_(GGGGS)5-human_IL15 _N4D/N65D_(single-Chain)-Fc(216)_IgG1_pI(-)_Isosteric_A _C220S/PVA_/S267K/L368D/K370S/M428L/N434S

SEQ ID NO: 176 - protein, 231 aa, Artificial Sequence; identical to SEQ ID NO: 72
  Description of Artificial Sequence: Synthetic polypeptide
  XENP24294 Chain 2 - empty-Fc(216)_IgG1_C220S/PVA _/S267K/S364K/E357Q/M428L/N434S

SEQ ID NO: 177 - protein, 350 aa, Artificial Sequence
  Description of Artificial Sequence: Synthetic polypeptide
  XENP24306 Chain 1 - human_IL15_D30N/E64Q/N65D_(GGGGS)1-Fc(216) _IgG1_pI(-)_Isosteric_A_C220S/PVA _/S267K/L368D/K370S/M428L/N434S
NWVNVISDLKKIEDLIQSMHIDATLYTESNVHPSCKVTAMKCFLLELQVISLESGDASIHDTVQDLIILANNSLSSNGNVTESGCKECEELEEKNIKEFLQSFVHIVQMFINTSGGGGSEPKSSDKTHTCPPCPAPPVAGPSVFLFPPKPKDTLMISRTPEVTCVVVDVKHEDPEVKFNWYVDGVEVHNAKTKPREEEYNSTYRVVSVLTVLHQDWLNGKEYKCKVSNKALPAPIEKTISKAKGQPREPQVYTLPPSREEMTKNQVSLTCDVSGFYPSDIAVEWESDGQPENNYKTTPPVLDSDGSFFLYSKLTVDKSRWEQGDVFSCSVLHEALHSHYTQKSLSLSPGK

SEQ ID NO: 178 - protein, 301 aa, Artificial Sequence; identical to SEQ ID NO: 172
  Description of Artificial Sequence: Synthetic polypeptide
  XENP24306 Chain 2 - human_IL15Ra(Sushi)_(GGGGS)1-Fc(216)_IgG1 _C220S/PVA_/S267K/S364K/E357Q/M428L/N434S

SEQ ID NO: 179 - protein, 125 aa, Artificial Sequence; identical to SEQ ID NO: 140
  Description of Artificial Sequence: Synthetic polypeptide
  Jmab-136[ICOS] variable heavy Chain

SEQ ID NO: 180 - protein, 5 aa, Artificial Sequence
  Description of Artificial Sequence: Synthetic peptide
  Jmab-136[ICOS] variable heavy Chain
GYYMH

SEQ ID NO: 181 - protein, 17 aa, Artificial Sequence
  Description of Artificial Sequence: Synthetic peptide
  Jmab-136[ICOS] variable heavy Chain
WINPHSGGTNYAQKFQG

SEQ ID NO: 182 - protein, 16 aa, Artificial Sequence
  Description of Artificial Sequence: Synthetic peptide
  Jmab-136[ICOS] variable heavy Chain
TYYYDSSGYYHDAFDI

SEQ ID NO: 183 - protein, 107 aa, Artificial Sequence; identical to SEQ ID NO: 141
  Description of Artificial Sequence: Synthetic polypeptide
  Jmab-136[ICOS] variable light Chain

SEQ ID NO: 184 - protein, 11 aa, Artificial Sequence
  Description of Artificial Sequence: Synthetic peptide
  Jmab-136[ICOS] variable light Chain
RASQGISRLLA

SEQ ID NO: 185 - protein, 7 aa, Artificial Sequence
  Description of Artificial Sequence: Synthetic peptide
  Jmab-136[ICOS] variable light Chain
VASSLQS

SEQ ID NO: 186 - protein, 9 aa, Artificial Sequence
  Description of Artificial Sequence: Synthetic peptide
  Jmab-136[ICOS] variable light Chain
QQANSFPWT

SEQ ID NO: 187 - protein, 123 aa, Artificial Sequence
  Description of Artificial Sequence: Synthetic polypeptide
  ICOS 314.8[ICOS] variable heavy Chain
QVQLQQPGTELMKPGASVKLSCKASGYTFTTYWMHWVKQRPGQGLEWIGEIDPSDSYVNYNQNFKGKATLTVDKSSSTAYIQLSSLTSEDSAVYFCARSPDYYGTSLAWFDYWGQGTLVTVST

SEQ ID NO: 188 - protein, 5 aa, Artificial Sequence
  Description of Artificial Sequence: Synthetic peptide
  ICOS 314.8[ICOS] variable heavy Chain
TYWMH

SEQ ID NO: 189 - protein, 17 aa, Artificial Sequence
  Description of Artificial Sequence: Synthetic peptide
  ICOS 314.8[ICOS] variable heavy Chain
EIDPSDSYVNYNQNFKG

SEQ ID NO: 190 - protein, 14 aa, Artificial Sequence
  Description of Artificial Sequence: Synthetic peptide
  ICOS 314.8[ICOS] variable heavy Chain
SPDYYGTSLAWFDY

SEQ ID NO: 191 - protein, 112 aa, Artificial Sequence
  Description of Artificial Sequence: Synthetic polypeptide
  ICOS 314.8[ICOS] variable light Chain
DIVMTQAAPSVPVTPGESVSISCRSSKSPLHSNGNIYLYWFLQRPGQSPQLLIYRMSNLASGVPDRFSGSGSGTTFTLKISRVEAEDVGVYYCMQHLEYPYTFGGGTKLEIK

SEQ ID NO: 192 - protein, 16 aa, Artificial Sequence
  Description of Artificial Sequence: Synthetic peptide
  ICOS 314.8[ICOS] variable light Chain
RSSKSPLHSNGNIYLY

SEQ ID NO: 193 - protein, 7 aa, Artificial Sequence
  Description of Artificial Sequence: Synthetic peptide
  ICOS 314.8[ICOS] variable light Chain
RMSNLAS

SEQ ID NO: 194 - protein, 9 aa, Artificial Sequence
  Description of Artificial Sequence: Synthetic peptide
  ICOS 314.8[ICOS] variable light Chain
MQHLEYPYT

SEQ ID NO: 195 - protein, 121 aa, Artificial Sequence
  Description of Artificial Sequence: Synthetic polypeptide
  H2L5[ICOS] variable heavy Chain
QVQLVQSGAEVKKPGSSVKVSCKASGYTFTDYAMHWVRQAPGQGLEWMGLISIYSDHTNYNQKFQGRVTITADKSTSTAYMELSSLRSEDTAVYYCGRNNYGNYGWYFDVWGQGTTVTVSS

SEQ ID NO: 196 - protein, 5 aa, Artificial Sequence
  Description of Artificial Sequence: Synthetic peptide
  H2L5[ICOS] variable heavy Chain
DYAMH

SEQ ID NO: 197 - protein, 17 aa, Artificial Sequence
  Description of Artificial Sequence: Synthetic peptide
  H2L5[ICOS] variable heavy Chain
LISIYSDHTNYNQKFQG

SEQ ID NO: 198 - protein, 12 aa, Artificial Sequence
  Description of Artificial Sequence: Synthetic peptide
  H2L5[ICOS] variable heavy Chain
NNYGNYGWYFDV

SEQ ID NO: 199 - protein, 106 aa, Artificial Sequence
  Description of Artificial Sequence: Synthetic polypeptide
  H2L5[ICOS] variable light Chain
EIVLTQSPATLSLSPGERATLSCSASSSVSYMHWYQQKPGQAPRLLIYDTSKLASGIPARFSGSGSGTDYTLTISSLEPEDFAVYYCFQGSGYPYTFGQGTKLEIK

SEQ ID NO: 200 - protein, 10 aa, Artificial Sequence
  Description of Artificial Sequence: Synthetic peptide
  H2L5[ICOS] variable light Chain
SASSSVSYMH

SEQ ID NO: 201 - protein, 7 aa, Artificial Sequence
  Description of Artificial Sequence: Synthetic peptide
  H2L5[ICOS] variable light Chain
DTSKLAS

SEQ ID NO: 202 - protein, 9 aa, Artificial Sequence
  Description of Artificial Sequence: Synthetic peptide
  H2L5[ICOS] variable light Chain
FQGSGYPYT

SEQ ID NO: 203 - protein, 117 aa, Artificial Sequence
  Description of Artificial Sequence: Synthetic polypeptide
  37A10S713[ICOS] variable heavy Chain
EVQLVESGGGLVQPGGSLRLSCAASGFTFSDYWMDWVRQAPGKGLVWVSNIDEDGSITEYSPFVKGRFTISRDNAKNTLYLQMNSLRAEDTAVYYCTRWGRFGFDSWGQGTLVTVSS

SEQ ID NO: 204 - protein, 5 aa, Artificial Sequence
  Description of Artificial Sequence: Synthetic peptide
  37A10S713[ICOS] variable heavy Chain
DYWMD

SEQ ID NO: 205 - protein, 17 aa, Artificial Sequence
  Description of Artificial Sequence: Synthetic peptide
  37A10S713[ICOS] variable heavy Chain
NIDEDGSITEYSPFVKG

SEQ ID NO: 206 - protein, 8 aa, Artificial Sequence
  Description of Artificial Sequence: Synthetic peptide
  37A10S713[ICOS] variable heavy Chain
WGRFGFDS

SEQ ID NO: 207 - protein, 111 aa, Artificial Sequence
  Description of Artificial Sequence: Synthetic polypeptide
  37A10S713[ICOS] variable light Chain
DIVMTQSPDSLAVSLGERATINCKSSQSLLSGSFNYLTWYQQKPGQPPKLLIFYASTRHTGVPDRFSGSGSGTDFTLTISSLQAEDVAVYYCHHHYNAPPTFGPGTKVDIK

SEQ ID NO: 208 - protein, 15 aa, Artificial Sequence
  Description of Artificial Sequence: Synthetic peptide
  37A10S713[ICOS] variable light Chain
KSSQSLLSGSFNYLT

SEQ ID NO: 209 - protein, 7 aa, Artificial Sequence
  Description of Artificial Sequence: Synthetic peptide
  37A10S713[ICOS] variable light Chain
YASTRHT

SEQ ID NO: 210 - protein, 9 aa, Artificial Sequence
  Description of Artificial Sequence: Synthetic peptide
  37A10S713[ICOS] variable light Chain
HHHYNAPPT

SEQ ID NO: 211 - protein, 121 aa, Artificial Sequence
  Description of Artificial Sequence: Synthetic polypeptide
  C398.4A[ICOS] variable heavy Chain
EVQLVESGGGLVKPAGSLTLSCVASGFTFSDYFMHWVRQAPGKGLEWVAVIDTKSFNYATYYSDLVKGRFTVSRDDSQGMVYLQMNNLRKEDTATYYCTATIAVPYYFDYWGQGTMVTVSS

SEQ ID NO: 212 - protein, 5 aa, Artificial Sequence
  Description of Artificial Sequence: Synthetic peptide
  C398.4A[ICOS] variable heavy Chain
DYFMH

SEQ ID NO: 213 - protein, 19 aa, Artificial Sequence
  Description of Artificial Sequence: Synthetic peptide
  C398.4A[ICOS] variable heavy Chain
VIDTKSFNYATYYSDLVKG

SEQ ID NO: 214 - protein, 10 aa, Artificial Sequence
  Description of Artificial Sequence: Synthetic peptide
  C398.4A[ICOS] variable heavy Chain
TIAVPYYFDY

SEQ ID NO: 215 - protein, 106 aa, Artificial Sequence
  Description of Artificial Sequence: Synthetic polypeptide
  C398.4A[ICOS] variable light Chain
DIQMTQSPSSLPASLGDRVTINCQASQDISNYLSWYQQKPGKAPKLLIYYTNLLADGVPSRFSGSGSGRDYSFTISSLESEDIGSYYCQQYYNYRTFGPGTKLEIK

SEQ ID NO: 216 - protein, 11 aa, Artificial Sequence
  Description of Artificial Sequence: Synthetic peptide
  C398.4A[ICOS] variable light Chain
QASQDISNYLS

SEQ ID NO: 217 - protein, 7 aa, Artificial Sequence
  Description of Artificial Sequence: Synthetic peptide
  C398.4A[ICOS] variable light Chain
YTNLLAD

SEQ ID NO: 218 - protein, 8 aa, Artificial Sequence
  Description of Artificial Sequence: Synthetic peptide
  C398.4A[ICOS] variable light Chain
QQYYNYRT

SEQ ID NO: 219 - protein, 121 aa, Artificial Sequence
  Description of Artificial Sequence: Synthetic polypeptide
  ICOS.33[ICOS] variable heavy Chain
EVQLVESGGGLVKPGGSLRLSCAASGFTFSDYFMHWVRQAPGKGLEWVGVIDTKSFNYATYYSDLVKGRFTISRDDSKNTLYLQMNSLKTEDTAVYYCTATIAVPYYFDYWGQGTLVTVSS

SEQ ID NO: 220 - protein, 5 aa, Artificial Sequence
  Description of Artificial Sequence: Synthetic peptide
  ICOS.33[ICOS] variable heavy Chain
DYFMH

SEQ ID NO: 221 - protein, 19 aa, Artificial Sequence
  Description of Artificial Sequence: Synthetic peptide
  ICOS.33[ICOS] variable heavy Chain
VIDTKSFNYATYYSDLVKG

SEQ ID NO: 222 - protein, 10 aa, Artificial Sequence
  Description of Artificial Sequence: Synthetic peptide
  ICOS.33[ICOS] variable heavy Chain
TIAVPYYFDY

SEQ ID NO: 223 - protein, 106 aa, Artificial Sequence
  Description of Artificial Sequence: Synthetic polypeptide
  ICOS.33[ICOS] variable light Chain
DIQMTQSPSSLSASVGDRVTITCQASQDISNYLSWYQQKPGKAPKLLIYYTNLLAEGVPSRFSGSGSGTDFTFTISSLQPEDIATYYCQQYYNYRTFGPGTKVDIK

SEQ ID NO: 224 - protein, 11 aa, Artificial Sequence
  Description of Artificial Sequence: Synthetic peptide
  ICOS.33[ICOS] variable light Chain
QASQDISNYLS

SEQ ID NO: 225 - protein, 7 aa, Artificial Sequence
  Description of Artificial Sequence: Synthetic peptide
  ICOS.33[ICOS] variable light Chain
YTNLLAE

SEQ ID NO: 226 - protein, 8 aa, Artificial Sequence
  Description of Artificial Sequence: Synthetic peptide
  ICOS.33[ICOS] variable light Chain
QQYYNYRT

SEQ ID NO: 227 - protein, 121 aa, Artificial Sequence
  Description of Artificial Sequence: Synthetic polypeptide
  STIM001[ICOS] variable heavy Chain
QVQVVQSGAEVKKPGASVKVSCKASGYTFSTFGITWVRQAPGQGLEWMGWISAYNGDTNYAQNLQGRVIMTTDTSTSTAYMELRSLRSDDTAVYYCARSSGHYYYYGMDVWGQGTTVTVSS

SEQ ID NO: 228 - protein, 5 aa, Artificial Sequence
  Description of Artificial Sequence: Synthetic peptide
  STIM001[ICOS] variable heavy Chain
TFGIT

SEQ ID NO: 229 - protein, 17 aa, Artificial Sequence
  Description of Artificial Sequence: Synthetic peptide
  STIM001[ICOS] variable heavy Chain
WISAYNGDTNYAQNLQG

SEQ ID NO: 230 - protein, 12 aa, Artificial Sequence
  Description of Artificial Sequence: Synthetic peptide
  STIM001[ICOS] variable heavy Chain
SSGHYYYYGMDV

SEQ ID NO: 231 - protein, 112 aa, Artificial Sequence
  Description of Artificial Sequence: Synthetic polypeptide
  STIM001[ICOS] variable light Chain
DIVMTQSPLSLPVTPGEPASISCRSSQSLLHSNEYNYLDWYLQKPGQSPQLLIFLGSNRASGVPDRFSGSGSGTDFTLKITRVEAEDVGIYYCMQSLQTPLTFGGGTKVEIK

SEQ ID NO: 232 - protein, 16 aa, Artificial Sequence
  Description of Artificial Sequence: Synthetic peptide
  STIM001[ICOS] variable light Chain
RSSQSLLHSNEYNYLD

SEQ ID NO: 233 - protein, 7 aa, Artificial Sequence
  Description of Artificial Sequence: Synthetic peptide
  STIM001[ICOS] variable light Chain
LGSNRAS

SEQ ID NO: 234 - protein, 9 aa, Artificial Sequence
  Description of Artificial Sequence: Synthetic peptide
  STIM001[ICOS] variable light Chain
MQSLQTPLT

SEQ ID NO: 235 - protein, 124 aa, Artificial Sequence
  Description of Artificial Sequence: Synthetic polypeptide
  STIM003[ICOS] variable heavy Chain
EVQLVESGGGVVRPGGSLRLSCVASGVTFDDYGMSWVRQAPGKGLEWVSGINWNGGDTDYSDSVKGRFTISRDNAKNSLYLQMNSLRAEDTALYYCARDFYGSGSYYHVPFDYWGQGILVTVSS

SEQ ID NO: 236 - protein, 5 aa, Artificial Sequence
  Description of Artificial Sequence: Synthetic peptide
  STIM003[ICOS] variable heavy Chain
DYGMS

SEQ ID NO: 237 - protein, 17 aa, Artificial Sequence
  Description of Artificial Sequence: Synthetic peptide
  STIM003[ICOS] variable heavy Chain
GINWNGGDTDYSDSVKG

SEQ ID NO: 238 - protein, 15 aa, Artificial Sequence
  Description of Artificial Sequence: Synthetic peptide
  STIM003[ICOS] variable heavy Chain
DFYGSGSYYHVPFDY

SEQ ID NO: 239 - protein, 108 aa, Artificial Sequence
  Description of Artificial Sequence: Synthetic polypeptide
  STIM003[ICOS] variable light Chain
EIVLTQSPGTLSLSPGERATLSCRASQSVSRSYLAWYQQKRGQAPRLLIYGASSRATGIPDRFSGDGSGTDFTLSISRLEPEDFAVYYCHQYDMSPFTFGPGTKVDIK

SEQ ID NO: 240 - protein, 12 aa, Artificial Sequence
  Description of Artificial Sequence: Synthetic peptide
  STIM003[ICOS] variable light Chain
RASQSVSRSYLA

SEQ ID NO: 241 - protein, 7 aa, Artificial Sequence
  Description of Artificial Sequence: Synthetic peptide
  STIM003[ICOS] variable light Chain
GASSRAT

SEQ ID NO: 242 - protein, 9 aa, Artificial Sequence
  Description of Artificial Sequence: Synthetic peptide
  STIM003[ICOS] variable light Chain
HQYDMSPFT

SEQ ID NO: 243 - protein, 435 aa, Artificial Sequence; identical to SEQ ID NO: 134
  Description of Artificial Sequence: Synthetic polypeptide
  human_IL15Ra(sushi)_(GGGGS)5-human _IL15(N4D/N65D;single-chain)- Jmab-136[ICOS]_IgG1_Fc(216)_IgG1 _pI(-)_Isosteric_A_C220S/PVA_/S267K/L368D/K370S-IgG1_PVA _/S267K/S364K/E357Q Chain 1 -  human_IL15Ra(sushi)
  CONT. FROM ABOVE: _(GGGGS)5-human_IL15(N4D/N65D;single-chain) _Fc(216)_IgG1_pI(-)_Isosteric_A_C220S/PVA_/S267K/L368D/K370S

SEQ ID NO: 244 - protein, 454 aa, Artificial Sequence
  Description of Artificial Sequence: Synthetic polypeptide
  human_IL15Ra(sushi)_(GGGGS)5-human _IL15(N4D/N65D;single-chain)- Jmab-136[ICOS]_IgG1_Fc(216)_IgG1 _pI(-)_Isosteric_A_C220S/PVA_/S267K/L368D/K370S-IgG1_PVA _/S267K/S364K/E357Q Chain 2 - Jmab-136[ICOS]_VH_IgG1_PVA
  CONT. FROM ABOVE: _/S267K/S364K/E357Q
QVQLVQSGAEVKKPGASVKVSCKASGYTFTGYYMHWVRQAPGQGLEWMGWINPHSGGTNYAQKFQGRVTMTRDTSISTAYMELSRLRSDDTAVYYCARTYYYDSSGYYHDAFDIWGQGTMVTVSSASTKGPSVFPLAPSSKSTSGGTAALGCLVKDYFPEPVTVSWNSGALTSGVHTFPAVLQSSGLYSLSSVVTVPSSSLGTQTYICNVNHKPSNTKVDKKVEPKSCDKTHTCPPCPAPPVAGPSVFLFPPKPKDTLMISRTPEVTCVVVDVKHEDPEVKFNWYVDGVEVHNAKTKPREEQYNSTYRVVSVLTVLHQDWLNGKEYKCKVSNKALPAPIEKTISKAKGQPREPQVYTLPPSREQMTKNQVKLTCLVKGFYPSDIAVEWESNGQPENNYKTTPPVLDSDGSFFLYSKLTVDKSRWQQGNVFSCSVMHEALHNHYTQKSLSLSPGK

SEQ ID NO: 245 - protein, 214 aa, Artificial Sequence; identical to SEQ ID NO: 146
  Description of Artificial Sequence: Synthetic polypeptide
  human_IL15Ra(sushi)_(GGGGS)5-human _IL15(N4D/N65D;single-chain)- Jmab-136[ICOS]_IgG1_Fc(216)_IgG1 _pI(-)_Isosteric_A_C220S/PVA_/S267K/L368D/K370S-IgG1_PVA _/S267K/S364K/E357Q Chain 3 -  Jmab-136[ICOS]_VL

SEQ ID NO: 246 - protein, 435 aa, Artificial Sequence; identical to SEQ ID NO: 134
  Description of Artificial Sequence: Synthetic polypeptide
  human_IL15Ra(sushi)_(GGGGS)5-human _IL15(N4D/N65D;single-chain)- ICOS 314.8[ICOS]_IgG1_Fc(216) _IgG1_pI(-)_Isosteric_A_C220S/PVA_/S267K/L368D/K370S-IgG1_PVA _/S267K/S364K/E357Q Chain 1 -  human_IL15Ra(sushi)
  CONT. FROM ABOVE: _(GGGGS)5-human_IL15(N4D/N65D;single-chain) _Fc(216)_IgG1_pI(-)_Isosteric_A_C220S/PVA_/S267K/L368D/K370S

SEQ ID NO: 247 - protein, 452 aa, Artificial Sequence
  Description of Artificial Sequence: Synthetic polypeptide
  human_IL15Ra(sushi)_(GGGGS)5-human _IL15(N4D/N65D;single-chain)- ICOS 314.8[ICOS]_IgG1_Fc(216) _IgG1_pI(-)_Isosteric_A_C220S/PVA_/S267K/L368D/K370S-IgG1_PVA _/S267K/S364K/E357Q Chain 2 - ICOS 314.8[ICOS]_VH_IgG1_PVA
  CONT. FROM ABOVE: _/S267K/S364K/E357Q
QVQLQQPGTELMKPGASVKLSCKASGYTFTTYWMHWVKQRPGQGLEWIGEIDPSDSYVNYNQNFKGKATLTVDKSSSTAYIQLSSLTSEDSAVYFCARSPDYYGTSLAWFDYWGQGTLVTVSTASTKGPSVFPLAPSSKSTSGGTAALGCLVKDYFPEPVTVSWNSGALTSGVHTFPAVLQSSGLYSLSSVVTVPSSSLGTQTYICNVNHKPSNTKVDKKVEPKSCDKTHTCPPCPAPPVAGPSVFLFPPKPKDTLMISRTPEVTCVVVDVKHEDPEVKFNWYVDGVEVHNAKTKPREEQYNSTYRVVSVLTVLHQDWLNGKEYKCKVSNKALPAPIEKTISKAKGQPREPQVYTLPPSREQMTKNQVKLTCLVKGFYPSDIAVEWESNGQPENNYKTTPPVLDSDGSFFLYSKLTVDKSRWQQGNVFSCSVMHEALHNHYTQKSLSLSPGK

SEQ ID NO: 248 - protein, 219 aa, Artificial Sequence
  Description of Artificial Sequence: Synthetic polypeptide
  human_IL15Ra(sushi)_(GGGGS)5-human _IL15(N4D/N65D;single-chain)- ICOS 314.8[ICOS]_IgG1_Fc(216) _IgG1_pI(-)_Isosteric_A_C220S/PVA_/S267K/L368D/K370S-IgG1_PVA _/S267K/S364K/E357Q Chain 3 -  ICOS 314.8[ICOS]_VL
DIVMTQAAPSVPVTPGESVSISCRSSKSPLHSNGNIYLYWFLQRPGQSPQLLIYRMSNLASGVPDRFSGSGSGTTFTLKISRVEAEDVGVYYCMQHLEYPYTFGGGTKLEIKRTVAAPSVFIFPPSDEQLKSGTASVVCLLNNFYPREAKVQWKVDNALQSGNSQESVTEQDSKDSTYSLSSTLTLSKADYEKHKVYACEVTHQGLSSPVTKSFNRGEC

SEQ ID NO: 249 - protein, 435 aa, Artificial Sequence; identical to SEQ ID NO: 134
  Description of Artificial Sequence: Synthetic polypeptide
  human_IL15Ra(sushi)_(GGGGS)5-human _IL15(N4D/N65D;single-chain)- H2L5[ICOS]_IgG1_Fc(216)_IgG1 _pI(-)_Isosteric_A_C220S/PVA_/S267K/L368D/K370S-IgG1_PVA _/S267K/S364K/E357Q Chain 1 -  human_IL15Ra(sushi)
  CONT. FROM ABOVE: _(GGGGS)5-human_IL15(N4D/N65D;single-chain) _Fc(216)_IgG1_pI(-)_Isosteric_A_C220S/PVA_/S267K/L368D/K370S

SEQ ID NO: 250 - protein, 450 aa, Artificial Sequence
  Description of Artificial Sequence: Synthetic polypeptide
  human_IL15Ra(sushi)_(GGGGS)5-human _IL15(N4D/N65D;single-chain)- H2L5[ICOS]_IgG1_Fc(216)_IgG1 _pI(-)_Isosteric_A_C220S/PVA_/S267K/L368D/K370S-IgG1_PVA _/S267K/S364K/E357Q Chain 2 - H2L5[ICOS]_VH_IgG1_PVA
  CONT. FROM ABOVE: _/S267K/S364K/E357Q
QVQLVQSGAEVKKPGSSVKVSCKASGYTFTDYAMHWVRQAPGQGLEWMGLISIYSDHTNYNQKFQGRVTITADKSTSTAYMELSSLRSEDTAVYYCGRNNYGNYGWYFDVWGQGTTVTVSSASTKGPSVFPLAPSSKSTSGGTAALGCLVKDYFPEPVTVSWNSGALTSGVHTFPAVLQSSGLYSLSSVVTVPSSSLGTQTYICNVNHKPSNTKVDKKVEPKSCDKTHTCPPCPAPPVAGPSVFLFPPKPKDTLMISRTPEVTCVVVDVKHEDPEVKFNWYVDGVEVHNAKTKPREEQYNSTYRVVSVLTVLHQDWLNGKEYKCKVSNKALPAPIEKTISKAKGQPREPQVYTLPPSREQMTKNQVKLTCLVKGFYPSDIAVEWESNGQPENNYKTTPPVLDSDGSFFLYSKLTVDKSRWQQGNVFSCSVMHEALHNHYTQKSLSLSPGK

SEQ ID NO: 251 - protein, 213 aa, Artificial Sequence
  Description of Artificial Sequence: Synthetic polypeptide
  human_IL15Ra(sushi)_(GGGGS)5-human _IL15(N4D/N65D;single-chain)- H2L5[ICOS]_IgG1_Fc(216)_IgG1 _pI(-)_Isosteric_A_C220S/PVA_/S267K/L368D/K370S-IgG1_PVA _/S267K/S364K/E357Q Chain 3 -  H2L5[ICOS]_VL
EIVLTQSPATLSLSPGERATLSCSASSSVSYMHWYQQKPGQAPRLLIYDTSKLASGIPARFSGSGSGTDYTLTISSLEPEDFAVYYCFQGSGYPYTFGQGTKLEIKRTVAAPSVFIFPPSDEQLKSGTASVVCLLNNFYPREAKVQWKVDNALQSGNSQESVTEQDSKDSTYSLSSTLTLSKADYEKHKVYACEVTHQGLSSPVTKSFNRGEC

SEQ ID NO: 252 - protein, 435 aa, Artificial Sequence; identical to SEQ ID NO: 134
  Description of Artificial Sequence: Synthetic polypeptide
  human_IL15Ra(sushi)_(GGGGS)5-human _IL15(N4D/N65D;single-chain)- 37A10S713[ICOS]_IgG1_Fc(216)_IgG1 _pI(-)_Isosteric_A_C220S/PVA_/S267K/L368D/K370S-IgG1_PVA _/S267K/S364K/E357Q Chain 1 -  human_IL15Ra(sushi)
  CONT. FROM ABOVE: _(GGGGS)5-human_IL15(N4D/N65D;single-chain) _Fc(216)_IgG1_pI(-)_Isosteric_A_C220S/PVA_/S267K/L368D/K370S

SEQ ID NO: 253 - protein, 446 aa, Artificial Sequence
  Description of Artificial Sequence: Synthetic polypeptide
  human_IL15Ra(sushi)_(GGGGS)5-human _IL15(N4D/N65D;single-chain)- 37A10S713[ICOS]_IgG1_Fc(216)_IgG1 _pI(-)_Isosteric_A_C220S/PVA_/S267K/L368D/K370S-IgG1_PVA _/S267K/S364K/E357Q Chain 2 - 37A10S713[ICOS]_VH_IgG1_PVA
  CONT. FROM ABOVE: _/S267K/S364K/E357Q
EVQLVESGGGLVQPGGSLRLSCAASGFTFSDYWMDWVRQAPGKGLVWVSNIDEDGSITEYSPFVKGRFTISRDNAKNTLYLQMNSLRAEDTAVYYCTRWGRFGFDSWGQGTLVTVSSASTKGPSVFPLAPSSKSTSGGTAALGCLVKDYFPEPVTVSWNSGALTSGVHTFPAVLQSSGLYSLSSVVTVPSSSLGTQTYICNVNHKPSNTKVDKKVEPKSCDKTHTCPPCPAPPVAGPSVFLFPPKPKDTLMISRTPEVTCVVVDVKHEDPEVKFNWYVDGVEVHNAKTKPREEQYNSTYRVVSVLTVLHQDWLNGKEYKCKVSNKALPAPIEKTISKAKGQPREPQVYTLPPSREQMTKNQVKLTCLVKGFYPSDIAVEWESNGQPENNYKTTPPVLDSDGSFFLYSKLTVDKSRWQQGNVFSCSVMHEALHNHYTQKSLSLSPGK

SEQ ID NO: 254 - protein, 218 aa, Artificial Sequence
  Description of Artificial Sequence: Synthetic polypeptide
  human_IL15Ra(sushi)_(GGGGS)5-human _IL15(N4D/N65D;single-chain)- 37A10S713[ICOS]_IgG1_Fc(216)_IgG1 _pI(-)_Isosteric_A_C220S/PVA_/S267K/L368D/K370S-IgG1_PVA _/S267K/S364K/E357Q Chain 3 -  37A10S713[ICOS]_VL
DIVMTQSPDSLAVSLGERATINCKSSQSLLSGSFNYLTWYQQKPGQPPKLLIFYASTRHTGVPDRFSGSGSGTDFTLTISSLQAEDVAVYYCHHHYNAPPTFGPGTKVDIKRTVAAPSVFIFPPSDEQLKSGTASVVCLLNNFYPREAKVQWKVDNALQSGNSQESVTEQDSKDSTYSLSSTLTLSKADYEKHKVYACEVTHQGLSSPVTKSFNRGEC

SEQ ID NO: 255 - protein, 435 aa, Artificial Sequence; identical to SEQ ID NO: 134
  Description of Artificial Sequence: Synthetic polypeptide
  human_IL15Ra(sushi)_(GGGGS)5-human _IL15(N4D/N65D;single-chain)- C398.4A[ICOS]_IgG1_Fc(216)_IgG1 _pI(-)_Isosteric_A_C220S/PVA_/S267K/L368D/K370S-IgG1_PVA _/S267K/S364K/E357Q Chain 1 -  human_IL15Ra(sushi)
  CONT. FROM ABOVE: _(GGGGS)5-human_IL15(N4D/N65D;single-chain) _Fc(216)_IgG1_pI(-)_Isosteric_A_C220S/PVA_/S267K/L368D/K370S

SEQ ID NO: 256 - protein, 450 aa, Artificial Sequence
  Description of Artificial Sequence: Synthetic polypeptide
  human_IL15Ra(sushi)_(GGGGS)5-human _IL15(N4D/N65D;single-chain)- C398.4A[ICOS]_IgG1_Fc(216)_IgG1 _pI(-)_Isosteric_A_C220S/PVA_/S267K/L368D/K370S-IgG1_PVA _/S267K/S364K/E357Q Chain 2 - C398.4A[ICOS]_VH_IgG1_PVA
  CONT. FROM ABOVE: _/S267K/S364K/E357Q
EVQLVESGGGLVKPAGSLTLSCVASGFTFSDYFMHWVRQAPGKGLEWVAVIDTKSFNYATYYSDLVKGRFTVSRDDSQGMVYLQMNNLRKEDTATYYCTATIAVPYYFDYWGQGTMVTVSSASTKGPSVFPLAPSSKSTSGGTAALGCLVKDYFPEPVTVSWNSGALTSGVHTFPAVLQSSGLYSLSSVVTVPSSSLGTQTYICNVNHKPSNTKVDKKVEPKSCDKTHTCPPCPAPPVAGPSVFLFPPKPKDTLMISRTPEVTCVVVDVKHEDPEVKFNWYVDGVEVHNAKTKPREEQYNSTYRVVSVLTVLHQDWLNGKEYKCKVSNKALPAPIEKTISKAKGQPREPQVYTLPPSREQMTKNQVKLTCLVKGFYPSDIAVEWESNGQPENNYKTTPPVLDSDGSFFLYSKLTVDKSRWQQGNVFSCSVMHEALHNHYTQKSLSLSPGK

SEQ ID NO: 257 - protein, 213 aa, Artificial Sequence
  Description of Artificial Sequence: Synthetic polypeptide
  human_IL15Ra(sushi)_(GGGGS)5-human _IL15(N4D/N65D;single-chain)- C398.4A[ICOS]_IgG1_Fc(216)_IgG1 _pI(-)_Isosteric_A_C220S/PVA_/S267K/L368D/K370S-IgG1_PVA _/S267K/S364K/E357Q Chain 3 -  C398.4A[ICOS]_VL
DIQMTQSPSSLPASLGDRVTINCQASQDISNYLSWYQQKPGKAPKLLIYYTNLLADGVPSRFSGSGSGRDYSFTISSLESEDIGSYYCQQYYNYRTFGPGTKLEIKRTVAAPSVFIFPPSDEQLKSGTASVVCLLNNFYPREAKVQWKVDNALQSGNSQESVTEQDSKDSTYSLSSTLTLSKADYEKHKVYACEVTHQGLSSPVTKSFNRGEC

SEQ ID NO: 258 - protein, 435 aa, Artificial Sequence; identical to SEQ ID NO: 134
  Description of Artificial Sequence: Synthetic polypeptide
  human_IL15Ra(sushi)_(GGGGS)5-human _IL15(N4D/N65D;single-chain)- ICOS.33[ICOS]_IgG1_Fc(216)_IgG1 _pI(-)_Isosteric_A_C220S/PVA_/S267K/L368D/K370S-IgG1_PVA _/S267K/S364K/E357Q Chain 1 -  human_IL15Ra(sushi)
  CONT. FROM ABOVE: _(GGGGS)5-human_IL15(N4D/N65D;single-chain) _Fc(216)_IgG1_pI(-)_Isosteric_A_C220S/PVA_/S267K/L368D/K370S

SEQ ID NO: 259 - protein, 450 aa, Artificial Sequence
  Description of Artificial Sequence: Synthetic polypeptide
  human_IL15Ra(sushi)_(GGGGS)5-human _IL15(N4D/N65D;single-chain)- ICOS.33[ICOS]_IgG1_Fc(216)_IgG1 _pI(-)_Isosteric_A_C220S/PVA_/S267K/L368D/K370S-IgG1_PVA _/S267K/S364K/E357Q Chain 2 - ICOS.33[ICOS]_VH_IgG1_PVA
  CONT. FROM ABOVE: _/S267K/S364K/E357Q
EVQLVESGGGLVKPGGSLRLSCAASGFTFSDYFMHWVRQAPGKGLEWVGVIDTKSFNYATYYSDLVKGRFTISRDDSKNTLYLQMNSLKTEDTAVYYCTATIAVPYYFDYWGQGTLVTVSSASTKGPSVFPLAPSSKSTSGGTAALGCLVKDYFPEPVTVSWNSGALTSGVHTFPAVLQSSGLYSLSSVVTVPSSSLGTQTYICNVNHKPSNTKVDKKVEPKSCDKTHTCPPCPAPPVAGPSVFLFPPKPKDTLMISRTPEVTCVVVDVKHEDPEVKFNWYVDGVEVHNAKTKPREEQYNSTYRVVSVLTVLHQDWLNGKEYKCKVSNKALPAPIEKTISKAKGQPREPQVYTLPPSREQMTKNQVKLTCLVKGFYPSDIAVEWESNGQPENNYKTTPPVLDSDGSFFLYSKLTVDKSRWQQGNVFSCSVMHEALHNHYTQKSLSLSPGK

SEQ ID NO: 260 - protein, 213 aa, Artificial Sequence
  Description of Artificial Sequence: Synthetic polypeptide
  human_IL15Ra(sushi)_(GGGGS)5-human _IL15(N4D/N65D;single-chain)- ICOS.33[ICOS]_IgG1_Fc(216)_IgG1 _pI(-)_Isosteric_A_C220S/PVA_/S267K/L368D/K370S-IgG1_PVA _/S267K/S364K/E357Q Chain 3 -  ICOS.33[ICOS]_VL
DIQMTQSPSSLSASVGDRVTITCQASQDISNYLSWYQQKPGKAPKLLIYYTNLLAEGVPSRFSGSGSGTDFTFTISSLQPEDIATYYCQQYYNYRTFGPGTKVDIKRTVAAPSVFIFPPSDEQLKSGTASVVCLLNNFYPREAKVQWKVDNALQSGNSQESVTEQDSKDSTYSLSSTLTLSKADYEKHKVYACEVTHQGLSSPVTKSFNRGEC

SEQ ID NO: 261 - protein, 435 aa, Artificial Sequence; identical to SEQ ID NO: 134
  Description of Artificial Sequence: Synthetic polypeptide
  human_IL15Ra(sushi)_(GGGGS)5-human _IL15(N4D/N65D;single-chain)- STIM001[ICOS]_IgG1_Fc(216)_IgG1 _pI(-)_Isosteric_A_C220S/PVA_/S267K/L368D/K370S-IgG1_PVA _/S267K/S364K/E357Q Chain 1 -  human_IL15Ra(sushi)
  CONT. FROM ABOVE: _(GGGGS)5-human_IL15(N4D/N65D;single-chain) _Fc(216)_IgG1_pI(-)_Isosteric_A_C220S/PVA_/S267K/L368D/K370S

SEQ ID NO: 262 - protein, 450 aa, Artificial Sequence
  Description of Artificial Sequence: Synthetic polypeptide
  human_IL15Ra(sushi)_(GGGGS)5-human _IL15(N4D/N65D;single-chain)- STIM001[ICOS]_IgG1_Fc(216)_IgG1 _pI(-)_Isosteric_A_C220S/PVA_/S267K/L368D/K370S-IgG1_PVA _/S267K/S364K/E357Q Chain 2 - STIM001[ICOS]_VH_IgG1_PVA
  CONT. FROM ABOVE: _/S267K/S364K/E357Q
QVQVVQSGAEVKKPGASVKVSCKASGYTFSTFGITWVRQAPGQGLEWMGWISAYNGDTNYAQNLQGRVIMTTDTSTSTAYMELRSLRSDDTAVYYCARSSGHYYYYGMDVWGQGTTVTVSSASTKGPSVFPLAPSSKSTSGGTAALGCLVKDYFPEPVTVSWNSGALTSGVHTFPAVLQSSGLYSLSSVVTVPSSSLGTQTYICNVNHKPSNTKVDKKVEPKSCDKTHTCPPCPAPPVAGPSVFLFPPKPKDTLMISRTPEVTCVVVDVKHEDPEVKFNWYVDGVEVHNAKTKPREEQYNSTYRVVSVLTVLHQDWLNGKEYKCKVSNKALPAPIEKTISKAKGQPREPQVYTLPPSREQMTKNQVKLTCLVKGFYPSDIAVEWESNGQPENNYKTTPPVLDSDGSFFLYSKLTVDKSRWQQGNVFSCSVMHEALHNHYTQKSLSLSPGK

SEQ ID NO: 263 - protein, 219 aa, Artificial Sequence
  Description of Artificial Sequence: Synthetic polypeptide
  human_IL15Ra(sushi)_(GGGGS)5-human _IL15(N4D/N65D;single-chain)- STIM001[ICOS]_IgG1_Fc(216)_IgG1 _pI(-)_Isosteric_A_C220S/PVA_/S267K/L368D/K370S-IgG1_PVA _/S267K/S364K/E357Q Chain 3 -  STIM001[ICOS]_VL
DIVMTQSPLSLPVTPGEPASISCRSSQSLLHSNEYNYLDWYLQKPGQSPQLLIFLGSNRASGVPDRFSGSGSGTDFTLKITRVEAEDVGIYYCMQSLQTPLTFGGGTKVEIKRTVAAPSVFIFPPSDEQLKSGTASVVCLLNNFYPREAKVQWKVDNALQSGNSQESVTEQDSKDSTYSLSSTLTLSKADYEKHKVYACEVTHQGLSSPVTKSFNRGEC

SEQ ID NO: 264 - protein, 435 aa, Artificial Sequence; identical to SEQ ID NO: 134
  Description of Artificial Sequence: Synthetic polypeptide
  human_IL15Ra(sushi)_(GGGGS)5-human _IL15(N4D/N65D;single-chain)- STIM003[ICOS]_IgG1_Fc(216)_IgG1 _pI(-)_Isosteric_A_C220S/PVA_/S267K/L368D/K370S-IgG1_PVA _/S267K/S364K/E357Q Chain 1 -  human_IL15Ra(sushi)
  CONT. FROM ABOVE: _(GGGGS)5-human_IL15(N4D/N65D;single-chain) _Fc(216)_IgG1_pI(-)_Isosteric_A_C220S/PVA_/S267K/L368D/K370S

SEQ ID NO: 265 - protein, 453 aa, Artificial Sequence
  Description of Artificial Sequence: Synthetic polypeptide
  human_IL15Ra(sushi)_(GGGGS)5-human _IL15(N4D/N65D;single-chain)- STIM003[ICOS]_IgG1_Fc(216)_IgG1 _pI(-)_Isosteric_A_C220S/PVA_/S267K/L368D/K370S-IgG1_PVA _/S267K/S364K/E357Q Chain 2 - STIM003[ICOS]_VH_IgG1_PVA
  CONT. FROM ABOVE: _/S267K/S364K/E357Q
EVQLVESGGGVVRPGGSLRLSCVASGVTFDDYGMSWVRQAPGKGLEWVSGINWNGGDTDYSDSVKGRFTISRDNAKNSLYLQMNSLRAEDTALYYCARDFYGSGSYYHVPFDYWGQGILVTVSSASTKGPSVFPLAPSSKSTSGGTAALGCLVKDYFPEPVTVSWNSGALTSGVHTFPAVLQSSGLYSLSSVVTVPSSSLGTQTYICNVNHKPSNTKVDKKVEPKSCDKTHTCPPCPAPPVAGPSVFLFPPKPKDTLMISRTPEVTCVVVDVKHEDPEVKFNWYVDGVEVHNAKTKPREEQYNSTYRVVSVLTVLHQDWLNGKEYKCKVSNKALPAPIEKTISKAKGQPREPQVYTLPPSREQMTKNQVKLTCLVKGFYPSDIAVEWESNGQPENNYKTTPPVLDSDGSFFLYSKLTVDKSRWQQGNVFSCSVMHEALHNHYTQKSLSLSPGK

SEQ ID NO: 266 - protein, 215 aa, Artificial Sequence
  Description of Artificial Sequence: Synthetic polypeptide
  human_IL15Ra(sushi)_(GGGGS)5-human _IL15(N4D/N65D;single-chain)- STIM003[ICOS]_IgG1_Fc(216)_IgG1 _pI(-)_Isosteric_A_C220S/PVA_/S267K/L368D/K370S-IgG1_PVA _/S267K/S364K/E357Q Chain 3 -  STIM003[ICOS]_VL
EIVLTQSPGTLSLSPGERATLSCRASQSVSRSYLAWYQQKRGQAPRLLIYGASSRATGIPDRFSGDGSGTDFTLSISRLEPEDFAVYYCHQYDMSPFTFGPGTKVDIKRTVAAPSVFIFPPSDEQLKSGTASVVCLLNNFYPREAKVQWKVDNALQSGNSQESVTEQDSKDSTYSLSSTLTLSKADYEKHKVYACEVTHQGLSSPVTKSFNRGEC

SEQ ID NO: 267 - protein, 435 aa, Artificial Sequence; identical to SEQ ID NO: 136
  Description of Artificial Sequence: Synthetic polypeptide
  human_IL15Ra(sushi)_(GGGGS)5-human _IL15(D30N/N65D;single-chain)- Jmab-136[ICOS]_IgG1_Fc(216)_IgG1 _pI(-)_Isosteric_A_C220S/PVA_/S267K/L368D/K370S-IgG1_PVA _/S267K/S364K/E357Q Chain 1 -  human_IL15Ra(sushi)
  CONT. FROM ABOVE: _(GGGGS)5-human_IL15(D30N/N65D;single-chain) _Fc(216)_IgG1_pI(-)_Isosteric_A_C220S/PVA_/S267K/L368D/K370S

SEQ ID NO: 268 - protein, 454 aa, Artificial Sequence; identical to SEQ ID NO: 244
  Description of Artificial Sequence: Synthetic polypeptide
  human_IL15Ra(sushi)_(GGGGS)5-human _IL15(D30N/N65D;single-chain)- Jmab-136[ICOS]_IgG1_Fc(216)_IgG1 _pI(-)_Isosteric_A_C220S/PVA_/S267K/L368D/K370S-IgG1_PVA _/S267K/S364K/E357Q Chain 2 - Jmab-136[ICOS]_VH_IgG1_PVA
  CONT. FROM ABOVE: _/S267K/S364K/E357Q

SEQ ID NO: 269 - protein, 214 aa, Artificial Sequence; identical to SEQ ID NO: 146
  Description of Artificial Sequence: Synthetic polypeptide
  human_IL15Ra(sushi)_(GGGGS)5-human _IL15(D30N/N65D;single-chain)- Jmab-136[ICOS]_IgG1_Fc(216)_IgG1 _pI(-)_Isosteric_A_C220S/PVA_/S267K/L368D/K370S-IgG1_PVA _/S267K/S364K/E357Q Chain 3 -  Jmab-136[ICOS]_VL

SEQ ID NO: 270 - protein, 435 aa, Artificial Sequence; identical to SEQ ID NO: 136
  Description of Artificial Sequence: Synthetic polypeptide
  human_IL15Ra(sushi)_(GGGGS)5-human _IL15(D30N/N65D;single-chain)- ICOS 314.8[ICOS]_IgG1_Fc(216) _IgG1_pI(-)_Isosteric_A_C220S/PVA_/S267K/L368D/K370S-IgG1_PVA _/S267K/S364K/E357Q Chain 1 -  human_IL15Ra(sushi)
  CONT. FROM ABOVE: _(GGGGS)5-human_IL15(D30N/N65D;single-chain) _Fc(216)_IgG1_pI(-)_Isosteric_A_C220S/PVA_/S267K/L368D/K370S

SEQ ID NO: 271 - protein, 452 aa, Artificial Sequence; identical to SEQ ID NO: 247
  Description of Artificial Sequence: Synthetic polypeptide
  human_IL15Ra(sushi)_(GGGGS)5-human _IL15(D30N/N65D;single-chain)- ICOS 314.8[ICOS]_IgG1_Fc(216) _IgG1_pI(-)_Isosteric_A_C220S/PVA_/S267K/L368D/K370S-IgG1_PVA _/S267K/S364K/E357Q Chain 2 - ICOS 314.8[ICOS]_VH_IgG1_PVA
  CONT. FROM ABOVE: _/S267K/S364K/E357Q

SEQ ID NO: 272 - protein, 219 aa, Artificial Sequence; identical to SEQ ID NO: 248
  Description of Artificial Sequence: Synthetic polypeptide
  human_IL15Ra(sushi)_(GGGGS)5-human _IL15(D30N/N65D;single-chain)- ICOS 314.8[ICOS]_IgG1_Fc(216) _IgG1_pI(-)_Isosteric_A_C220S/PVA_/S267K/L368D/K370S-IgG1_PVA _/S267K/S364K/E357Q Chain 3 -  ICOS 314.8[ICOS]_VL

SEQ ID NO: 273 - protein, 435 aa, Artificial Sequence; identical to SEQ ID NO: 136
  Description of Artificial Sequence: Synthetic polypeptide
  human_IL15Ra(sushi)_(GGGGS)5-human _IL15(D30N/N65D;single-chain)- H2L5[ICOS]_IgG1_Fc(216)_IgG1 _pI(-)_Isosteric_A_C220S/PVA_/S267K/L368D/K370S-IgG1_PVA _/S267K/S364K/E357Q Chain 1 -  human_IL15Ra(sushi)
  CONT. FROM ABOVE: _(GGGGS)5-human_IL15(D30N/N65D;single-chain) _Fc(216)_IgG1_pI(-)_Isosteric_A_C220S/PVA_/S267K/L368D/K370S

SEQ ID NO: 274 - protein, 450 aa, Artificial Sequence; identical to SEQ ID NO: 250
  Description of Artificial Sequence: Synthetic polypeptide
  human_IL15Ra(sushi)_(GGGGS)5-human _IL15(D30N/N65D;single-chain)- H2L5[ICOS]_IgG1_Fc(216)_IgG1 _pI(-)_Isosteric_A_C220S/PVA_/S267K/L368D/K370S-IgG1_PVA _/S267K/S364K/E357Q Chain 2 - H2L5[ICOS]_VH_IgG1_PVA
  CONT. FROM ABOVE: _/S267K/S364K/E357Q

SEQ ID NO: 275 - protein, 213 aa, Artificial Sequence; identical to SEQ ID NO: 251
  Description of Artificial Sequence: Synthetic polypeptide
  human_IL15Ra(sushi)_(GGGGS)5-human _IL15(D30N/N65D;single-chain)- H2L5[ICOS]_IgG1_Fc(216)_IgG1 _pI(-)_Isosteric_A_C220S/PVA_/S267K/L368D/K370S-IgG1_PVA _/S267K/S364K/E357Q Chain 3 -  H2L5[ICOS]_VL

SEQ ID NO: 276 - protein, 435 aa, Artificial Sequence; identical to SEQ ID NO: 136
  Description of Artificial Sequence: Synthetic polypeptide
  human_IL15Ra(sushi)_(GGGGS)5-human _IL15(D30N/N65D;single-chain)- 37A10S713[ICOS]_IgG1_Fc(216) _IgG1_pI(-)_Isosteric_A_C220S/PVA_/S267K/L368D/K370S-IgG1_PVA _/S267K/S364K/E357Q Chain 1 -  human_IL15Ra(sushi)
  CONT. FROM ABOVE: _(GGGGS)5-human_IL15(D30N/N65D;single-chain) _Fc(216)_IgG1_pI(-)_Isosteric_A_C220S/PVA_/S267K/L368D/K370S

SEQ ID NO: 277 - protein, 446 aa, Artificial Sequence; identical to SEQ ID NO: 253
  Description of Artificial Sequence: Synthetic polypeptide
  human_IL15Ra(sushi)_(GGGGS)5-human _IL15(D30N/N65D;single-chain)- 37A10S713[ICOS]_IgG1_Fc(216) _IgG1_pI(-)_Isosteric_A_C220S/PVA_/S267K/L368D/K370S-IgG1_PVA _/S267K/S364K/E357Q Chain 2 - 37A10S713[ICOS]_VH_IgG1_PVA
  CONT. FROM ABOVE: _/S267K/S364K/E357Q

SEQ ID NO: 278 - protein, 218 aa, Artificial Sequence; identical to SEQ ID NO: 254
  Description of Artificial Sequence: Synthetic polypeptide
  human_IL15Ra(sushi)_(GGGGS)5-human _IL15(D30N/N65D;single-chain)- 37A10S713[ICOS]_IgG1_Fc(216) _IgG1_pI(-)_Isosteric_A_C220S/PVA_/S267K/L368D/K370S-IgG1_PVA _/S267K/S364K/E357Q Chain 3 -  37A10S713[ICOS]_VL

SEQ ID NO: 279 - protein, 435 aa, Artificial Sequence; identical to SEQ ID NO: 136
  Description of Artificial Sequence: Synthetic polypeptide
  human_IL15Ra(sushi)_(GGGGS)5-human _IL15(D30N/N65D;single-chain)- C398.4A[ICOS]_IgG1_Fc(216)_IgG1 _pI(-)_Isosteric_A_C220S/PVA_/S267K/L368D/K370S-IgG1_PVA _/S267K/S364K/E357Q Chain 1 -  human_IL15Ra(sushi)
  CONT. FROM ABOVE: _(GGGGS)5-human_IL15(D30N/N65D;single-chain) _Fc(216)_IgG1_pI(-)_Isosteric_A_C220S/PVA_/S267K/L368D/K370S

SEQ ID NO: 280 - protein, 450 aa, Artificial Sequence; identical to SEQ ID NO: 256
  Description of Artificial Sequence: Synthetic polypeptide
  human_IL15Ra(sushi)_(GGGGS)5-human _IL15(D30N/N65D;single-chain)- C398.4A[ICOS]_IgG1_Fc(216)_IgG1 _pI(-)_Isosteric_A_C220S/PVA_/S267K/L368D/K370S-IgG1_PVA _/S267K/S364K/E357Q Chain 2 - C398.4A[ICOS]_VH_IgG1_PVA
  CONT. FROM ABOVE: _/S267K/S364K/E357Q

SEQ ID NO: 281 - protein, 213 aa, Artificial Sequence; identical to SEQ ID NO: 257
  Description of Artificial Sequence: Synthetic polypeptide
  human_IL15Ra(sushi)_(GGGGS)5-human _IL15(D30N/N65D;single-chain)- C398.4A[ICOS]_IgG1_Fc(216)_IgG1 _pI(-)_Isosteric_A_C220S/PVA_/S267K/L368D/K370S-IgG1_PVA _/S267K/S364K/E357Q Chain 3 -  C398.4A[ICOS]_VL

SEQ ID NO: 282 - protein, 435 aa, Artificial Sequence; identical to SEQ ID NO: 136
  Description of Artificial Sequence: Synthetic polypeptide
  human_IL15Ra(sushi)_(GGGGS)5-human _IL15(D30N/N65D;single-chain)- ICOS.33[ICOS]_IgG1_Fc(216)_IgG1 _pI(-)_Isosteric_A_C220S/PVA_/S267K/L368D/K370S-IgG1_PVA _/S267K/S364K/E357Q Chain 1 -  human_IL15Ra(sushi)
  CONT. FROM ABOVE: _(GGGGS)5-human_IL15(D30N/N65D;single-chain) _Fc(216)_IgG1_pI(-)_Isosteric_A_C220S/PVA_/S267K/L368D/K370S

SEQ ID NO: 283 - protein, 450 aa, Artificial Sequence; identical to SEQ ID NO: 259
  Description of Artificial Sequence: Synthetic polypeptide
  human_IL15Ra(sushi)_(GGGGS)5-human _IL15(D30N/N65D;single-chain)- ICOS.33[ICOS]_IgG1_Fc(216)_IgG1 _pI(-)_Isosteric_A_C220S/PVA_/S267K/L368D/K370S-IgG1_PVA _/S267K/S364K/E357Q Chain 2 - ICOS.33[ICOS]_VH_IgG1_PVA
  CONT. FROM ABOVE: _/S267K/S364K/E357Q

SEQ ID NO: 284 - protein, 213 aa, Artificial Sequence; identical to SEQ ID NO: 260
  Description of Artificial Sequence: Synthetic polypeptide
  human_IL15Ra(sushi)_(GGGGS)5-human _IL15(D30N/N65D;single-chain)- ICOS.33[ICOS]_IgG1_Fc(216)_IgG1 _pI(-)_Isosteric_A_C220S/PVA_/S267K/L368D/K370S-IgG1_PVA _/S267K/S364K/E357Q Chain 3 -  ICOS.33[ICOS]_VL

SEQ ID NO: 285 - protein, 435 aa, Artificial Sequence; identical to SEQ ID NO: 136
  Description of Artificial Sequence: Synthetic polypeptide
  human_IL15Ra(sushi)_(GGGGS)5-human _IL15(D30N/N65D;single-chain)- STIM001[ICOS]_IgG1_Fc(216)_IgG1 _pI(-)_Isosteric_A_C220S/PVA_/S267K/L368D/K370S-IgG1_PVA _/S267K/S364K/E357Q Chain 1 -  human_IL15Ra(sushi)
  CONT. FROM ABOVE: _(GGGGS)5-human_IL15(D30N/N65D;single-chain) _Fc(216)_IgG1_pI(-)_Isosteric_A_C220S/PVA_/S267K/L368D/K370S

SEQ ID NO: 286 - protein, 450 aa, Artificial Sequence; identical to SEQ ID NO: 262
  Description of Artificial Sequence: Synthetic polypeptide
  human_IL15Ra(sushi)_(GGGGS)5-human _IL15(D30N/N65D;single-chain)- STIM001[ICOS]_IgG1_Fc(216)_IgG1 _pI(-)_Isosteric_A_C220S/PVA_/S267K/L368D/K370S-IgG1_PVA _/S267K/S364K/E357Q Chain 2 - STIM001[ICOS]_VH_IgG1_PVA
  CONT. FROM ABOVE: _/S267K/S364K/E357Q

SEQ ID NO: 287 - protein, 219 aa, Artificial Sequence; identical to SEQ ID NO: 263
  Description of Artificial Sequence: Synthetic polypeptide
  human_IL15Ra(sushi)_(GGGGS)5-human _IL15(D30N/N65D;single-chain)- STIM001[ICOS]_IgG1_Fc(216)_IgG1 _pI(-)_Isosteric_A_C220S/PVA_/S267K/L368D/K370S-IgG1_PVA _/S267K/S364K/E357Q Chain 3 -  STIM001[ICOS]_VL

SEQ ID NO: 288 - protein, 435 aa, Artificial Sequence; identical to SEQ ID NO: 136
  Description of Artificial Sequence: Synthetic polypeptide
  human_IL15Ra(sushi)_(GGGGS)5-human _IL15(D30N/N65D;single-chain)- STIM003[ICOS]_IgG1_Fc(216)_IgG1 _pI(-)_Isosteric_A_C220S/PVA_/S267K/L368D/K370S-IgG1_PVA _/S267K/S364K/E357Q Chain 1 -  human_IL15Ra(sushi)
  CONT. FROM ABOVE: _(GGGGS)5-human_IL15(D30N/N65D;single-chain) _Fc(216)_IgG1_pI(-)_Isosteric_A_C220S/PVA_/S267K/L368D/K370S

SEQ ID NO: 289 - protein, 453 aa, Artificial Sequence; identical to SEQ ID NO: 265
  Description of Artificial Sequence: Synthetic polypeptide
  human_IL15Ra(sushi)_(GGGGS)5-human _IL15(D30N/N65D;single-chain)- STIM003[ICOS]_IgG1_Fc(216)_IgG1 _pI(-)_Isosteric_A_C220S/PVA_/S267K/L368D/K370S-IgG1_PVA _/S267K/S364K/E357Q Chain 2 - STIM003[ICOS]_VH_IgG1_PVA
  CONT. FROM ABOVE: _/S267K/S364K/E357Q

SEQ ID NO: 290 - protein, 215 aa, Artificial Sequence; identical to SEQ ID NO: 266
  Description of Artificial Sequence: Synthetic polypeptide
  human_IL15Ra(sushi)_(GGGGS)5-human _IL15(D30N/N65D;single-chain)- STIM003[ICOS]_IgG1_Fc(216)_IgG1 _pI(-)_Isosteric_A_C220S/PVA_/S267K/L368D/K370S-IgG1_PVA _/S267K/S364K/E357Q Chain 3 -  STIM003[ICOS]_VL

SEQ ID NO: 291 - protein, 435 aa, Artificial Sequence; identical to SEQ ID NO: 138
  Description of Artificial Sequence: Synthetic polypeptide
  human_IL15Ra(sushi)_(GGGGS)5-human _IL15(D30N/E64Q/N65D;single-chain)- Jmab-136[ICOS]_IgG1_Fc(216) _IgG1_pI(-)_Isosteric_A_C220S/PVA_/S267K/L368D/K370S-IgG1_PVA _/S267K/S364K/E357Q Chain 1 -  human_IL15Ra(sushi)
  CONT. FROM ABOVE: _(GGGGS)5-human _IL15(D30N/E64Q/N65D;single-chain)_Fc(216)_IgG1_pI(-)_Isosteric _A_C220S/PVA_/S267K/L368D/K370S

SEQ ID NO: 292 - protein, 454 aa, Artificial Sequence; identical to SEQ ID NO: 244
  Description of Artificial Sequence: Synthetic polypeptide
  human_IL15Ra(sushi)_(GGGGS)5-human _IL15(D30N/E64Q/N65D;single-chain)- Jmab-136[ICOS]_IgG1_Fc(216) _IgG1_pI(-)_Isosteric_A_C220S/PVA_/S267K/L368D/K370S-IgG1_PVA _/S267K/S364K/E357Q Chain 2 - Jmab-136[ICOS]_VH_IgG1_PVA
  CONT. FROM ABOVE: _/S267K/S364K/E357Q

SEQ ID NO: 293 - protein, 214 aa, Artificial Sequence; identical to SEQ ID NO: 146
  Description of Artificial Sequence: Synthetic polypeptide
  human_IL15Ra(sushi)_(GGGGS)5-human _IL15(D30N/E64Q/N65D;single-chain)- Jmab-136[ICOS]_IgG1_Fc(216) _IgG1_pI(-)_Isosteric_A_C220S/PVA_/S267K/L368D/K370S-IgG1_PVA _/S267K/S364K/E357Q Chain 3 -  Jmab-136[ICOS]_VL

SEQ ID NO: 294 - protein, 435 aa, Artificial Sequence; identical to SEQ ID NO: 138
  Description of Artificial Sequence: Synthetic polypeptide
  human_IL15Ra(sushi)_(GGGGS)5-human _IL15(D30N/E64Q/N65D;single-chain)- ICOS 314.8[ICOS]_IgG1 _Fc(216)_IgG1_pI(-)_Isosteric_A_C220S/PVA _/S267K/L368D/K370S-IgG1_PVA
  CONT. FROM ABOVE: _/S267K/S364K/E357Q Chain 1 -  human _IL15Ra(sushi)_(GGGGS)5-human_IL15(D30N/E64Q/N65D;single-chain) _Fc(216)_IgG1_pI(-)_Isosteric_A_C220S/PVA_/S267K/L368D/K370S

SEQ ID NO: 295 - protein, 452 aa, Artificial Sequence; identical to SEQ ID NO: 247
  Description of Artificial Sequence: Synthetic polypeptide
  human_IL15Ra(sushi)_(GGGGS)5-human _IL15(D30N/E64Q/N65D;single-chain)- ICOS 314.8[ICOS]_IgG1 _Fc(216)_IgG1_pI(-)_Isosteric_A_C220S/PVA _/S267K/L368D/K370S-IgG1_PVA
  CONT. FROM ABOVE: _/S267K/S364K/E357Q Chain 2 - ICOS 314.8[ICOS]_VH_IgG1_PVA _/S267K/S364K/E357Q

SEQ ID NO: 296 - protein, 219 aa, Artificial Sequence; identical to SEQ ID NO: 248
  Description of Artificial Sequence: Synthetic polypeptide
  human_IL15Ra(sushi)_(GGGGS)5-human _IL15(D30N/E64Q/N65D;single-chain)- ICOS 314.8[ICOS]_IgG1 _Fc(216)_IgG1_pI(-)_Isosteric_A_C220S/PVA _/S267K/L368D/K370S-IgG1_PVA
  CONT. FROM ABOVE: _/S267K/S364K/E357Q Chain 3 -  ICOS 314.8[ICOS]_VL

SEQ ID NO: 297 - protein, 435 aa, Artificial Sequence; identical to SEQ ID NO: 138
  Description of Artificial Sequence: Synthetic polypeptide
  human_IL15Ra(sushi)_(GGGGS)5-human _IL15(D30N/E64Q/N65D;single-chain)- H2L5[ICOS]_IgG1_Fc(216) _IgG1_pI(-)_Isosteric_A_C220S/PVA_/S267K/L368D/K370S-IgG1_PVA _/S267K/S364K/E357Q Chain 1 -  human_IL15Ra(sushi)
  CONT. FROM ABOVE: _(GGGGS)5-human _IL15(D30N/E64Q/N65D;single-chain)_Fc(216)_IgG1_pI(-)_Isosteric _A_C220S/PVA_/S267K/L368D/K370S

SEQ ID NO: 298 - protein, 450 aa, Artificial Sequence; identical to SEQ ID NO: 250
  Description of Artificial Sequence: Synthetic polypeptide
  human_IL15Ra(sushi)_(GGGGS)5-human _IL15(D30N/E64Q/N65D;single-chain)- H2L5[ICOS]_IgG1_Fc(216) _IgG1_pI(-)_Isosteric_A_C220S/PVA_/S267K/L368D/K370S-IgG1_PVA _/S267K/S364K/E357Q Chain 2 - H2L5[ICOS]_VH_IgG1_PVA
  CONT. FROM ABOVE: _/S267K/S364K/E357Q

SEQ ID NO: 299 - protein, 213 aa, Artificial Sequence; identical to SEQ ID NO: 251
  Description of Artificial Sequence: Synthetic polypeptide
  human_IL15Ra(sushi)_(GGGGS)5-human _IL15(D30N/E64Q/N65D;single-chain)- H2L5[ICOS]_IgG1_Fc(216) _IgG1_pI(-)_Isosteric_A_C220S/PVA_/S267K/L368D/K370S-IgG1_PVA _/S267K/S364K/E357Q Chain 3 -  H2L5[ICOS]_VL

SEQ ID NO: 300 - protein, 435 aa, Artificial Sequence; identical to SEQ ID NO: 138
  Description of Artificial Sequence: Synthetic polypeptide
  human_IL15Ra(sushi)_(GGGGS)5-human _IL15(D30N/E64Q/N65D;single-chain)- 37A10S713[ICOS]_IgG1 _Fc(216)_IgG1_pI(-)_Isosteric_A_C220S/PVA _/S267K/L368D/K370S-IgG1_PVA
  CONT. FROM ABOVE: _/S267K/S364K/E357Q Chain 1 -  human _IL15Ra(sushi)_(GGGGS)5-human_IL15(D30N/E64Q/N65D;single-chain) _Fc(216)_IgG1_pI(-)_Isosteric_A_C220S/PVA_/S267K/L368D/K370S

SEQ ID NO: 301 - protein, 446 aa, Artificial Sequence; identical to SEQ ID NO: 253
  Description of Artificial Sequence: Synthetic polypeptide
  human_IL15Ra(sushi)_(GGGGS)5-human _IL15(D30N/E64Q/N65D;single-chain)- 37A10S713[ICOS]_IgG1 _Fc(216)_IgG1_pI(-)_Isosteric_A_C220S/PVA _/S267K/L368D/K370S-IgG1_PVA
  CONT. FROM ABOVE: _/S267K/S364K/E357Q Chain 2 - 37A10S713[ICOS] _VH_IgG1_PVA_/S267K/S364K/E357Q

SEQ ID NO: 302 - protein, 218 aa, Artificial Sequence; identical to SEQ ID NO: 254
  Description of Artificial Sequence: Synthetic polypeptide
  human_IL15Ra(sushi)_(GGGGS)5-human _IL15(D30N/E64Q/N65D;single-chain)- 37A10S713[ICOS]_IgG1 _Fc(216)_IgG1_pI(-)_Isosteric_A_C220S/PVA _/S267K/L368D/K370S-IgG1_PVA
  CONT. FROM ABOVE: _/S267K/S364K/E357Q Chain 3 -  37A10S713[ICOS]_VL

SEQ ID NO: 303 - protein, 435 aa, Artificial Sequence; identical to SEQ ID NO: 138
  Description of Artificial Sequence: Synthetic polypeptide
  human_IL15Ra(sushi)_(GGGGS)5-human _IL15(D30N/E64Q/N65D;single-chain)- C398.4A[ICOS]_IgG1_Fc(216) _IgG1_pI(-)_Isosteric_A_C220S/PVA_/S267K/L368D/K370S-IgG1_PVA _/S267K/S364K/E357Q Chain 1 -  human_IL15Ra(sushi)
  CONT. FROM ABOVE: _(GGGGS)5-human _IL15(D30N/E64Q/N65D;single-chain)_Fc(216)_IgG1_pI(-)_Isosteric _A_C220S/PVA_/S267K/L368D/K370S

SEQ ID NO: 304 - protein, 450 aa, Artificial Sequence; identical to SEQ ID NO: 256
  Description of Artificial Sequence: Synthetic polypeptide
  human_IL15Ra(sushi)_(GGGGS)5-human _IL15(D30N/E64Q/N65D;single-chain)- C398.4A[ICOS]_IgG1_Fc(216) _IgG1_pI(-)_Isosteric_A_C220S/PVA_/S267K/L368D/K370S-IgG1_PVA _/S267K/S364K/E357Q Chain 2 - C398.4A[ICOS]_VH_IgG1_PVA
  CONT. FROM ABOVE: _/S267K/S364K/E357Q

SEQ ID NO: 305 - protein, 213 aa, Artificial Sequence; identical to SEQ ID NO: 257
  Description of Artificial Sequence: Synthetic polypeptide
  human_IL15Ra(sushi)_(GGGGS)5-human _IL15(D30N/E64Q/N65D;single-chain)- C398.4A[ICOS]_IgG1_Fc(216) _IgG1_pI(-)_Isosteric_A_C220S/PVA_/S267K/L368D/K370S-IgG1_PVA _/S267K/S364K/E357Q Chain 3 -  C398.4A[ICOS]_VL

SEQ ID NO: 306 - protein, 435 aa, Artificial Sequence; identical to SEQ ID NO: 138
  Description of Artificial Sequence: Synthetic polypeptide
  human_IL15Ra(sushi)_(GGGGS)5-human _IL15(D30N/E64Q/N65D;single-chain)- ICOS.33[ICOS]_IgG1_Fc(216) _IgG1_pI(-)_Isosteric_A_C220S/PVA_/S267K/L368D/K370S-IgG1_PVA _/S267K/S364K/E357Q Chain 1 -  human_IL15Ra(sushi)
  CONT. FROM ABOVE: _(GGGGS)5-human _IL15(D30N/E64Q/N65D;single-chain)_Fc(216)_IgG1_pI(-)_Isosteric _A_C220S/PVA_/S267K/L368D/K370S

SEQ ID NO: 307 - protein, 450 aa, Artificial Sequence; identical to SEQ ID NO: 259
  Description of Artificial Sequence: Synthetic polypeptide
  human_IL15Ra(sushi)_(GGGGS)5-human _IL15(D30N/E64Q/N65D;single-chain)- ICOS.33[ICOS]_IgG1_Fc(216) _IgG1_pI(-)_Isosteric_A_C220S/PVA_/S267K/L368D/K370S-IgG1_PVA _/S267K/S364K/E357Q Chain 2 - ICOS.33[ICOS]_VH_IgG1_PVA
  CONT. FROM ABOVE: _/S267K/S364K/E357Q

SEQ ID NO: 308 - protein, 213 aa, Artificial Sequence; identical to SEQ ID NO: 260
  Description of Artificial Sequence: Synthetic polypeptide
  human_IL15Ra(sushi)_(GGGGS)5-human _IL15(D30N/E64Q/N65D;single-chain)- ICOS.33[ICOS]_IgG1_Fc(216) _IgG1_pI(-)_Isosteric_A_C220S/PVA_/S267K/L368D/K370S-IgG1_PVA _/S267K/S364K/E357Q Chain 3 -  ICOS.33[ICOS]_VL

SEQ ID NO: 309 - protein, 435 aa, Artificial Sequence; identical to SEQ ID NO: 138
  Description of Artificial Sequence: Synthetic polypeptide
  human_IL15Ra(sushi)_(GGGGS)5-human _IL15(D30N/E64Q/N65D;single-chain)- STIM001[ICOS]_IgG1_Fc(216) _IgG1_pI(-)_Isosteric_A_C220S/PVA_/S267K/L368D/K370S-IgG1_PVA _/S267K/S364K/E357Q Chain 1 -  human_IL15Ra(sushi)
  CONT. FROM ABOVE: _(GGGGS)5-human _IL15(D30N/E64Q/N65D;single-chain)_Fc(216)_IgG1_pI(-)_Isosteric _A_C220S/PVA_/S267K/L368D/K370S

SEQ ID NO: 310 - protein, 450 aa, Artificial Sequence; identical to SEQ ID NO: 262
  Description of Artificial Sequence: Synthetic polypeptide
  human_IL15Ra(sushi)_(GGGGS)5-human _IL15(D30N/E64Q/N65D;single-chain)- STIM001[ICOS]_IgG1_Fc(216) _IgG1_pI(-)_Isosteric_A_C220S/PVA_/S267K/L368D/K370S-IgG1_PVA _/S267K/S364K/E357Q Chain 2 - STIM001[ICOS]_VH_IgG1_PVA
  CONT. FROM ABOVE: _/S267K/S364K/E357Q

SEQ ID NO: 311 - protein, 219 aa, Artificial Sequence; identical to SEQ ID NO: 263
  Description of Artificial Sequence: Synthetic polypeptide
  human_IL15Ra(sushi)_(GGGGS)5-human _IL15(D30N/E64Q/N65D;single-chain)- STIM001[ICOS]_IgG1_Fc(216) _IgG1_pI(-)_Isosteric_A_C220S/PVA_/S267K/L368D/K370S-IgG1_PVA _/S267K/S364K/E357Q Chain 3 -  STIM001[ICOS]_VL

SEQ ID NO: 312 - protein, 435 aa, Artificial Sequence; identical to SEQ ID NO: 138
  Description of Artificial Sequence: Synthetic polypeptide
  human_IL15Ra(sushi)_(GGGGS)5-human _IL15(D30N/E64Q/N65D;single-chain)- STIM003[ICOS]_IgG1_Fc(216) _IgG1_pI(-)_Isosteric_A_C220S/PVA_/S267K/L368D/K370S-IgG1_PVA _/S267K/S364K/E357Q Chain 1 -  human_IL15Ra(sushi)
  CONT. FROM ABOVE: _(GGGGS)5-human _IL15(D30N/E64Q/N65D;single-chain)_Fc(216)_IgG1_pI(-)_Isosteric _A_C220S/PVA_/S267K/L368D/K370S

SEQ ID NO: 313 - protein, 453 aa, Artificial Sequence; identical to SEQ ID NO: 265
  Description of Artificial Sequence: Synthetic polypeptide
  human_IL15Ra(sushi)_(GGGGS)5-human _IL15(D30N/E64Q/N65D;single-chain)- STIM003[ICOS]_IgG1_Fc(216) _IgG1_pI(-)_Isosteric_A_C220S/PVA_/S267K/L368D/K370S-IgG1_PVA _/S267K/S364K/E357Q Chain 2 - STIM003[ICOS]_VH_IgG1_PVA
  CONT. FROM ABOVE: _/S267K/S364K/E357Q

SEQ ID NO: 314 - protein, 215 aa, Artificial Sequence; identical to SEQ ID NO: 266
  Description of Artificial Sequence: Synthetic polypeptide
  human_IL15Ra(sushi)_(GGGGS)5-human _IL15(D30N/E64Q/N65D;single-chain)- STIM003[ICOS]_IgG1_Fc(216) _IgG1_pI(-)_Isosteric_A_C220S/PVA_/S267K/L368D/K370S-IgG1_PVA _/S267K/S364K/E357Q Chain 3 -  STIM003[ICOS]_VL

SEQ ID NO: 315 - protein, 125 aa, Artificial Sequence; identical to SEQ ID NO: 140
  Description of Artificial Sequence: Synthetic polypeptide
  XENP016435 [anti-ICOS]_H0L0_IgG1_PVA _/S267K Variable heavy (vh) domain

SEQ ID NO: 316 - protein, 5 aa, Artificial Sequence
  Description of Artificial Sequence: Synthetic peptide
  XENP016435 [anti-ICOS]_H0L0_IgG1_PVA_/S267K vhCDR1
GYYMH

SEQ ID NO: 317 - protein, 17 aa, Artificial Sequence
  Description of Artificial Sequence: Synthetic peptide
  XENP016435 [anti-ICOS]_H0L0_IgG1_PVA_/S267K vhCDR2
WINPHSGGTNYAQKFQG

SEQ ID NO: 318 - protein, 16 aa, Artificial Sequence
  Description of Artificial Sequence: Synthetic peptide
  XENP016435 [anti-ICOS]_H0L0_IgG1_PVA_/S267K vhCDR3
TYYYDSSGYYHDAFDI

SEQ ID NO: 319 - protein, 454 aa, Artificial Sequence
  Description of Artificial Sequence: Synthetic polypeptide
  XENP016435 [anti-ICOS]_H0L0_IgG1_PVA_/S267K Full length HC
QVQLVQSGAEVKKPGASVKVSCKASGYTFTGYYMHWVRQAPGQGLEWMGWINPHSGGTNYAQKFQGRVTMTRDTSISTAYMELSRLRSDDTAVYYCARTYYYDSSGYYHDAFDIWGQGTMVTVSSASTKGPSVFPLAPSSKSTSGGTAALGCLVKDYFPEPVTVSWNSGALTSGVHTFPAVLQSSGLYSLSSVVTVPSSSLGTQTYICNVNHKPSNTKVDKKVEPKSCDKTHTCPPCPAPPVAGPSVFLFPPKPKDTLMISRTPEVTCVVVDVKHEDPEVKFNWYVDGVEVHNAKTKPREEQYNSTYRVVSVLTVLHQDWLNGKEYKCKVSNKALPAPIEKTISKAKGQPREPQVYTLPPSREEMTKNQVSLTCLVKGFYPSDIAVEWESNGQPENNYKTTPPVLDSDGSFFLYSKLTVDKSRWQQGNVFSCSVMHEALHNHYTQKSLSLSPGK

SEQ ID NO: 320 - protein, 107 aa, Artificial Sequence; identical to SEQ ID NO: 141
  Description of Artificial Sequence: Synthetic polypeptide
  XENP016435 [anti-ICOS]_H0L0_IgG1_PVA _/S267K Variable light (vl) domain

SEQ ID NO: 321 - protein, 11 aa, Artificial Sequence
  Description of Artificial Sequence: Synthetic peptide
  XENP016435 [anti-ICOS]_H0L0_IgG1_PVA_/S267K vlCDR1
RASQGISRLLA

SEQ ID NO: 322 - protein, 7 aa, Artificial Sequence
  Description of Artificial Sequence: Synthetic peptide
  XENP016435 [anti-ICOS]_H0L0_IgG1_PVA_/S267K vlCDR2
VASSLQS

SEQ ID NO: 323 - protein, 9 aa, Artificial Sequence
  Description of Artificial Sequence: Synthetic peptide
  XENP016435 [anti-ICOS]_H0L0_IgG1_PVA_/S267K vlCDR3
QQANSFPWT

SEQ ID NO: 324 - protein, 214 aa, Artificial Sequence; identical to SEQ ID NO: 146
  Description of Artificial Sequence: Synthetic polypeptide
  XENP016435 [anti-ICOS]_H0L0_IgG1_PVA _/S267K Full length light chain

SEQ ID NO: 325 - protein, 123 aa, Artificial Sequence; identical to SEQ ID NO: 187
  Description of Artificial Sequence: Synthetic polypeptide
  XENP021820 GSK_314.8[ICOS]_H0L0_IgG1_PVA _/S267K Variable heavy (vh) domain

SEQ ID NO: 326 - protein, 5 aa, Artificial Sequence
  Description of Artificial Sequence: Synthetic peptide
  XENP021820 GSK_314.8[ICOS]_H0L0_IgG1_PVA_/S267K vhCDR1
TYWMH

SEQ ID NO: 327 - protein, 17 aa, Artificial Sequence
  Description of Artificial Sequence: Synthetic peptide
  XENP021820 GSK_314.8[ICOS]_H0L0_IgG1_PVA_/S267K vhCDR2
EIDPSDSYVNYNQNFKG

SEQ ID NO: 328 - protein, 14 aa, Artificial Sequence
  Description of Artificial Sequence: Synthetic peptide
  XENP021820 GSK_314.8[ICOS]_H0L0_IgG1_PVA_/S267K vhCDR3
SPDYYGTSLAWFDY

SEQ ID NO: 329 - protein, 452 aa, Artificial Sequence
  Description of Artificial Sequence: Synthetic polypeptide
  XENP021820 GSK_314.8[ICOS]_H0L0_IgG1_PVA_/S267K Full length HC
QVQLQQPGTELMKPGASVKLSCKASGYTFTTYWMHWVKQRPGQGLEWIGEIDPSDSYVNYNQNFKGKATLTVDKSSSTAYIQLSSLTSEDSAVYFCARSPDYYGTSLAWFDYWGQGTLVTVSTASTKGPSVFPLAPSSKSTSGGTAALGCLVKDYFPEPVTVSWNSGALTSGVHTFPAVLQSSGLYSLSSVVTVPSSSLGTQTYICNVNHKPSNTKVDKKVEPKSCDKTHTCPPCPAPPVAGPSVFLFPPKPKDTLMISRTPEVTCVVVDVKHEDPEVKFNWYVDGVEVHNAKTKPREEQYNSTYRVVSVLTVLHQDWLNGKEYKCKVSNKALPAPIEKTISKAKGQPREPQVYTLPPSREEMTKNQVSLTCLVKGFYPSDIAVEWESNGQPENNYKTTPPVLDSDGSFFLYSKLTVDKSRWQQGNVFSCSVMHEALHNHYTQKSLSLSPGK

SEQ ID NO: 330 - protein, 112 aa, Artificial Sequence; identical to SEQ ID NO: 191
  Description of Artificial Sequence: Synthetic polypeptide
  XENP021820 GSK_314.8[ICOS]_H0L0_IgG1_PVA _/S267K Variable light (vl) domain

SEQ ID NO: 331 - protein, 16 aa, Artificial Sequence
  Description of Artificial Sequence: Synthetic peptide
  XENP021820 GSK_314.8[ICOS]_H0L0_IgG1_PVA_/S267K vlCDR1
RSSKSPLHSNGNIYLY

SEQ ID NO: 332 - protein, 7 aa, Artificial Sequence
  Description of Artificial Sequence: Synthetic peptide
  XENP021820 GSK_314.8[ICOS]_H0L0_IgG1_PVA_/S267K vlCDR2
RMSNLAS

SEQ ID NO: 333 - protein, 9 aa, Artificial Sequence
  Description of Artificial Sequence: Synthetic peptide
  XENP021820 GSK_314.8[ICOS]_H0L0_IgG1_PVA_/S267K vlCDR3
MQHLEYPYT

SEQ ID NO: 334 - protein, 219 aa, Artificial Sequence; identical to SEQ ID NO: 248
  Description of Artificial Sequence: Synthetic polypeptide
  XENP021820 GSK_314.8[ICOS]_H0L0_IgG1_PVA _/S267K Full length light chain

SEQ ID NO: 335 - protein, 124 aa, Artificial Sequence
  Description of Artificial Sequence: Synthetic polypeptide
  XENP021821 GSK_88.2[ICOS]_H0L0_IgG1_PVA _/S267K Variable heavy (vh) domain
QVQLQQPGAELVRPGASVKLSCKASGYSFTSYWINWVKQRPGQGLEWIGNIYPSDSYTNYNQMFKDKATLTVDKSSNTAYMQLTSPTSEDSAVYYCTRWNLSYYFDNNYYLDYWGQGTTLTVSS

SEQ ID NO: 336 - protein, 5 aa, Artificial Sequence
  Description of Artificial Sequence: Synthetic peptide
  XENP021821 GSK_88.2[ICOS]_H0L0_IgG1_PVA_/S267K vhCDR1
SYWIN

SEQ ID NO: 337 - protein, 17 aa, Artificial Sequence
  Description of Artificial Sequence: Synthetic peptide
  XENP021821 GSK_88.2[ICOS]_H0L0_IgG1_PVA_/S267K vhCDR2
NIYPSDSYTNYNQMFKD

SEQ ID NO: 338 - protein, 15 aa, Artificial Sequence
  Description of Artificial Sequence: Synthetic peptide
  XENP021821 GSK_88.2[ICOS]_H0L0_IgG1_PVA_/S267K vhCDR3
WNLSYYFDNNYYLDY

SEQ ID NO: 339 - protein, 453 aa, Artificial Sequence
  Description of Artificial Sequence: Synthetic polypeptide
  XENP021821 GSK_88.2[ICOS]_H0L0_IgG1_PVA_/S267K Full length HC
QVQLQQPGAELVRPGASVKLSCKASGYSFTSYWINWVKQRPGQGLEWIGNIYPSDSYTNYNQMFKDKATLTVDKSSNTAYMQLTSPTSEDSAVYYCTRWNLSYYFDNNYYLDYWGQGTTLTVSSASTKGPSVFPLAPSSKSTSGGTAALGCLVKDYFPEPVTVSWNSGALTSGVHTFPAVLQSSGLYSLSSVVTVPSSSLGTQTYICNVNHKPSNTKVDKKVEPKSCDKTHTCPPCPAPPVAGPSVFLFPPKPKDTLMISRTPEVTCVVVDVKHEDPEVKFNWYVDGVEVHNAKTKPREEQYNSTYRVVSVLTVLHQDWLNGKEYKCKVSNKALPAPIEKTISKAKGQPREPQVYTLPPSREEMTKNQVSLTCLVKGFYPSDIAVEWESNGQPENNYKTTPPVLDSDGSFFLYSKLTVDKSRWQQGNVFSCSVMHEALHNHYTQKSLSLSPGK

SEQ ID NO: 340 - protein, 112 aa, Artificial Sequence
  Description of Artificial Sequence: Synthetic polypeptide
  XENP021821 GSK_88.2[ICOS]_H0L0_IgG1_PVA _/S267K Variable light (vl) domain
DIVMTQAAPSVPVTPGESVSISCRSSKSLLHSNGNTYLYWFLQRPGQSPQLLIYRMSNLASGVPDRFSGSGSGTAFTLRISRVEAEDVGVYYCMQHLEYPWTFGGGTKLEIK

SEQ ID NO: 341 - protein, 16 aa, Artificial Sequence
  Description of Artificial Sequence: Synthetic peptide
  XENP021821 GSK_88.2[ICOS]_H0L0_IgG1_PVA_/S267K vlCDR1
RSSKSLLHSNGNTYLY

SEQ ID NO: 342 - protein, 7 aa, Artificial Sequence
  Description of Artificial Sequence: Synthetic peptide
  XENP021821 GSK_88.2[ICOS]_H0L0_IgG1_PVA_/S267K vlCDR2
RMSNLAS

SEQ ID NO: 343 - protein, 9 aa, Artificial Sequence
  Description of Artificial Sequence: Synthetic peptide
  XENP021821 GSK_88.2[ICOS]_H0L0_IgG1_PVA_/S267K vlCDR3
MQHLEYPWT

SEQ ID NO: 344 - protein, 219 aa, Artificial Sequence
  Description of Artificial Sequence: Synthetic polypeptide
  XENP021821 GSK_88.2[ICOS]_H0L0_IgG1_PVA _/S267K Full length light chain
DIVMTQAAPSVPVTPGESVSISCRSSKSLLHSNGNTYLYWFLQRPGQSPQLLIYRMSNLASGVPDRFSGSGSGTAFTLRISRVEAEDVGVYYCMQHLEYPWTFGGGTKLEIKRTVAAPSVFIFPPSDEQLKSGTASVVCLLNNFYPREAKVQWKVDNALQSGNSQESVTEQDSKDSTYSLSSTLTLSKADYEKHKVYACEVTHQGLSSPVTKSFNRGEC

SEQ ID NO: 345 - protein, 125 aa, Artificial Sequence
  Description of Artificial Sequence: Synthetic polypeptide
  XENP021822 jMab-138[ICOS]_H0L0_IgG1_PVA _/S267K Variable heavy (vh) domain
EVQLVESGGGLVQPGGSLRLSCAASGFTFSSYDMHWVRQATGKGLEWVSAIGTAGDTYYPGSVKGRFTISRENAKNSLYLQMNSLRAGDTAVYYCVRDNRKVTHEHYYYYGMDVWGQGTTVTVSS

SEQ ID NO: 346 - protein, 5 aa, Artificial Sequence
  Description of Artificial Sequence: Synthetic peptide
  XENP021822 jMab-138[ICOS]_H0L0_IgG1_PVA_/S267K vhCDR1
SYDMH

SEQ ID NO: 347 - protein, 16 aa, Artificial Sequence
  Description of Artificial Sequence: Synthetic peptide
  XENP021822 jMab-138[ICOS]_H0L0_IgG1_PVA_/S267K vhCDR2
AIGTAGDTYYPGSVKG

SEQ ID NO: 348 - protein, 17 aa, Artificial Sequence
  Description of Artificial Sequence: Synthetic peptide
  XENP021822 jMab-138[ICOS]_H0L0_IgG1_PVA_/S267K vhCDR3
DNRKVTHEHYYYYGMDV

SEQ ID NO: 349 - protein, 454 aa, Artificial Sequence
  Description of Artificial Sequence: Synthetic polypeptide
  XENP021822 jMab-138[ICOS]_H0L0_IgG1_PVA_/S267K Full length HC
EVQLVESGGGLVQPGGSLRLSCAASGFTFSSYDMHWVRQATGKGLEWVSAIGTAGDTYYPGSVKGRFTISRENAKNSLYLQMNSLRAGDTAVYYCVRDNRKVTHEHYYYYGMDVWGQGTTVTVSSASTKGPSVFPLAPSSKSTSGGTAALGCLVKDYFPEPVTVSWNSGALTSGVHTFPAVLQSSGLYSLSSVVTVPSSSLGTQTYICNVNHKPSNTKVDKKVEPKSCDKTHTCPPCPAPPVAGPSVFLFPPKPKDTLMISRTPEVTCVVVDVKHEDPEVKFNWYVDGVEVHNAKTKPREEQYNSTYRVVSVLTVLHQDWLNGKEYKCKVSNKALPAPIEKTISKAKGQPREPQVYTLPPSREEMTKNQVSLTCLVKGFYPSDIAVEWESNGQPENNYKTTPPVLDSDGSFFLYSKLTVDKSRWQQGNVFSCSVMHEALHNHYTQKSLSLSPGK

SEQ ID NO: 350 - protein, 109 aa, Artificial Sequence
  Description of Artificial Sequence: Synthetic polypeptide
  XENP021822 jMab-138[ICOS]_H0L0_IgG1_PVA _/S267K Variable light (vl) domain
EIVLTQSPGTLSLSPGERATLSCRASQNIRSSYLAWYQQKPGQAPGLLIYGASSRATGIPDRFSGSGSGTDFTLTISRLEPEDFAVYYCQQFGSSPMCSFGQGTKLEIK

SEQ ID NO: 351 - protein, 12 aa, Artificial Sequence
  Description of Artificial Sequence: Synthetic peptide
  XENP021822 jMab-138[ICOS]_H0L0_IgG1_PVA_/S267K vlCDR1
RASQNIRSSYLA

SEQ ID NO: 352 - protein, 7 aa, Artificial Sequence
  Description of Artificial Sequence: Synthetic peptide
  XENP021822 jMab-138[ICOS]_H0L0_IgG1_PVA_/S267K vlCDR2
GASSRAT

SEQ ID NO: 353 - protein, 10 aa, Artificial Sequence
  Description of Artificial Sequence: Synthetic peptide
  XENP021822 jMab-138[ICOS]_H0L0_IgG1_PVA_/S267K vlCDR3
QQFGSSPMCS

SEQ ID NO: 354 - protein, 216 aa, Artificial Sequence
  Description of Artificial Sequence: Synthetic polypeptide
  XENP021822 jMab-138[ICOS]_H0L0_IgG1_PVA _/S267K Full length light chain
EIVLTQSPGTLSLSPGERATLSCRASQNIRSSYLAWYQQKPGQAPGLLIYGASSRATGIPDRFSGSGSGTDFTLTISRLEPEDFAVYYCQQFGSSPMCSFGQGTKLEIKRTVAAPSVFIFPPSDEQLKSGTASVVCLLNNFYPREAKVQWKVDNALQSGNSQESVTEQDSKDSTYSLSSTLTLSKADYEKHKVYACEVTHQGLSSPVTKSFNRGEC

SEQ ID NO: 355 - protein, 125 aa, Artificial Sequence
  Description of Artificial Sequence: Synthetic polypeptide
  XENP021823 jMab-139[ICOS]_H0L0_IgG1_PVA _/S267K Variable heavy (vh) domain
EVQLVESGGGLVQPGGSLRLSCAASGFTFSSYDMHWVRQATGKGLEWVSAIGTAGDTYYPGSVKGRFTISRENAKNSLYLQMNSLRAGDTAVYYCVRDKRTVTHEHYYYYGMDVWGQGTTVTVSS

SEQ ID NO: 356 - protein, 5 aa, Artificial Sequence
  Description of Artificial Sequence: Synthetic peptide
  XENP021823 jMab-139[ICOS]_H0L0_IgG1_PVA_/S267K vhCDR1
SYDMH

SEQ ID NO: 357 - protein, 16 aa, Artificial Sequence
  Description of Artificial Sequence: Synthetic peptide
  XENP021823 jMab-139[ICOS]_H0L0_IgG1_PVA_/S267K vhCDR2
AIGTAGDTYYPGSVKG

SEQ ID NO: 358 - protein, 17 aa, Artificial Sequence
  Description of Artificial Sequence: Synthetic peptide
  XENP021823 jMab-139[ICOS]_H0L0_IgG1_PVA_/S267K vhCDR3
DKRTVTHEHYYYYGMDV

SEQ ID NO: 359 - protein, 454 aa, Artificial Sequence
  Description of Artificial Sequence: Synthetic polypeptide
  XENP021823 jMab-139[ICOS]_H0L0_IgG1_PVA_/S267K Full length HC
EVQLVESGGGLVQPGGSLRLSCAASGFTFSSYDMHWVRQATGKGLEWVSAIGTAGDTYYPGSVKGRFTISRENAKNSLYLQMNSLRAGDTAVYYCVRDKRTVTHEHYYYYGMDVWGQGTTVTVSSASTKGPSVFPLAPSSKSTSGGTAALGCLVKDYFPEPVTVSWNSGALTSGVHTFPAVLQSSGLYSLSSVVTVPSSSLGTQTYICNVNHKPSNTKVDKKVEPKSCDKTHTCPPCPAPPVAGPSVFLFPPKPKDTLMISRTPEVTCVVVDVKHEDPEVKFNWYVDGVEVHNAKTKPREEQYNSTYRVVSVLTVLHQDWLNGKEYKCKVSNKALPAPIEKTISKAKGQPREPQVYTLPPSREEMTKNQVSLTCLVKGFYPSDIAVEWESNGQPENNYKTTPPVLDSDGSFFLYSKLTVDKSRWQQGNVFSCSVMHEALHNHYTQKSLSLSPGK

SEQ ID NO: 360 - protein, 109 aa, Artificial Sequence
  Description of Artificial Sequence: Synthetic polypeptide
  XENP021823 jMab-139[ICOS]_H0L0_IgG1_PVA _/S267K Variable light (vl) domain
EIVLTQSPGTLSLSPGERATLSCRASQSISSSSLAWYQQKPGQAPGLLIFGASSRATGIPDRFSGSGSGTDFTLTISRLEPEDFAVYYCQQFGSSPMCSFGQGTKLEIK

SEQ ID NO: 361 - protein, 12 aa, Artificial Sequence
  Description of Artificial Sequence: Synthetic peptide
  XENP021823 jMab-139[ICOS]_H0L0_IgG1_PVA_/S267K vlCDR1
RASQSISSSSLA

SEQ ID NO: 362 - protein, 7 aa, Artificial Sequence
  Description of Artificial Sequence: Synthetic peptide
  XENP021823 jMab-139[ICOS]_H0L0_IgG1_PVA_/S267K vlCDR2
GASSRAT

SEQ ID NO: 363 - protein, 10 aa, Artificial Sequence
  Description of Artificial Sequence: Synthetic peptide
  XENP021823 jMab-139[ICOS]_H0L0_IgG1_PVA_/S267K vlCDR3
QQFGSSPMCS

SEQ ID NO: 364 - protein, 216 aa, Artificial Sequence
  Description of Artificial Sequence: Synthetic polypeptide
  XENP021823 jMab-139[ICOS]_H0L0_IgG1_PVA _/S267K Full length light chain
EIVLTQSPGTLSLSPGERATLSCRASQSISSSSLAWYQQKPGQAPGLLIFGASSRATGIPDRFSGSGSGTDFTLTISRLEPEDFAVYYCQQFGSSPMCSFGQGTKLEIKRTVAAPSVFIFPPSDEQLKSGTASVVCLLNNFYPREAKVQWKVDNALQSGNSQESVTEQDSKDSTYSLSSTLTLSKADYEKHKVYACEVTHQGLSSPVTKSFNRGEC

SEQ ID NO: 365 - protein, 121 aa, Artificial Sequence; identical to SEQ ID NO: 195
  Description of Artificial Sequence: Synthetic polypeptide
  XENP022346 WO2016059602_GSK[ICOS]_H0L0_IgG1_PVA _/S267K Variable heavy (vh) domain

SEQ ID NO: 366 - protein, 5 aa, Artificial Sequence
  Description of Artificial Sequence: Synthetic peptide
  XENP022346 WO2016059602_GSK[ICOS]_H0L0_IgG1_PVA_/S267K vhCDR1
DYAMH

SEQ ID NO: 367 - protein, 17 aa, Artificial Sequence
  Description of Artificial Sequence: Synthetic peptide
  XENP022346 WO2016059602_GSK[ICOS]_H0L0_IgG1_PVA_/S267K vhCDR2
LISIYSDHTNYNQKFQG

SEQ ID NO: 368 - protein, 12 aa, Artificial Sequence
  Description of Artificial Sequence: Synthetic peptide
  XENP022346 WO2016059602_GSK[ICOS]_H0L0_IgG1_PVA_/S267K vhCDR3
NNYGNYGWYFDV

SEQ ID NO: 369 - protein, 450 aa, Artificial Sequence
  Description of Artificial Sequence: Synthetic polypeptide
  XENP022346 WO2016059602_GSK[ICOS]_H0L0_IgG1_PVA _/S267K Full length HC
QVQLVQSGAEVKKPGSSVKVSCKASGYTFTDYAMHWVRQAPGQGLEWMGLISIYSDHTNYNQKFQGRVTITADKSTSTAYMELSSLRSEDTAVYYCGRNNYGNYGWYFDVWGQGTTVTVSSASTKGPSVFPLAPSSKSTSGGTAALGCLVKDYFPEPVTVSWNSGALTSGVHTFPAVLQSSGLYSLSSVVTVPSSSLGTQTYICNVNHKPSNTKVDKKVEPKSCDKTHTCPPCPAPPVAGPSVFLFPPKPKDTLMISRTPEVTCVVVDVKHEDPEVKFNWYVDGVEVHNAKTKPREEQYNSTYRVVSVLTVLHQDWLNGKEYKCKVSNKALPAPIEKTISKAKGQPREPQVYTLPPSREEMTKNQVSLTCLVKGFYPSDIAVEWESNGQPENNYKTTPPVLDSDGSFFLYSKLTVDKSRWQQGNVFSCSVMHEALHNHYTQKSLSLSPGK

SEQ ID NO: 370 - protein, 106 aa, Artificial Sequence; identical to SEQ ID NO: 199
  Description of Artificial Sequence: Synthetic polypeptide
  XENP022346 WO2016059602_GSK[ICOS]_H0L0_IgG1_PVA _/S267K Variable light (vl) domain

SEQ ID NO: 371 - protein, 10 aa, Artificial Sequence
  Description of Artificial Sequence: Synthetic peptide
  XENP022346 WO2016059602_GSK[ICOS]_H0L0_IgG1_PVA_/S267K vlCDR1
SASSSVSYMH

SEQ ID NO: 372 - protein, 7 aa, Artificial Sequence
  Description of Artificial Sequence: Synthetic peptide
  XENP022346 WO2016059602_GSK[ICOS]_H0L0_IgG1_PVA_/S267K vlCDR2
DTSKLAS

SEQ ID NO: 373 - protein, 9 aa, Artificial Sequence
  Description of Artificial Sequence: Synthetic peptide
  XENP022346 WO2016059602_GSK[ICOS]_H0L0_IgG1_PVA_/S267K vlCDR3
FQGSGYPYT

SEQ ID NO: 374 - protein, 213 aa, Artificial Sequence; identical to SEQ ID NO: 251
  Description of Artificial Sequence: Synthetic polypeptide
  XENP022346 WO2016059602_GSK[ICOS]_H0L0_IgG1_PVA _/S267K Full length light chain

SEQ ID NO: 375 - protein, 117 aa, Artificial Sequence; identical to SEQ ID NO: 203
  Description of Artificial Sequence: Synthetic polypeptide
  XENP023057 Jounce_37A10S713[ICOS]_H0L0_IgG1_PVA _/S267K Variable heavy (vh) domain

SEQ ID NO: 376 - protein, 5 aa, Artificial Sequence
  Description of Artificial Sequence: Synthetic peptide
  XENP023057 Jounce_37A10S713[ICOS]_H0L0_IgG1_PVA_/S267K vhCDR1
DYWMD

SEQ ID NO: 377 - protein, 17 aa, Artificial Sequence
  Description of Artificial Sequence: Synthetic peptide
  XENP023057 Jounce_37A10S713[ICOS]_H0L0_IgG1_PVA_/S267K vhCDR2
NIDEDGSITEYSPFVKG

SEQ ID NO: 378 - protein, 8 aa, Artificial Sequence
  Description of Artificial Sequence: Synthetic peptide
  XENP023057 Jounce_37A10S713[ICOS]_H0L0_IgG1_PVA_/S267K vhCDR3
WGRFGFDS

SEQ ID NO: 379 - protein, 446 aa, Artificial Sequence
  Description of Artificial Sequence: Synthetic polypeptide
  XENP023057 Jounce_37A10S713[ICOS]_H0L0_IgG1_PVA _/S267K Full length HC
EVQLVESGGGLVQPGGSLRLSCAASGFTFSDYWMDWVRQAPGKGLVWVSNIDEDGSITEYSPFVKGRFTISRDNAKNTLYLQMNSLRAEDTAVYYCTRWGRFGFDSWGQGTLVTVSSASTKGPSVFPLAPSSKSTSGGTAALGCLVKDYFPEPVTVSWNSGALTSGVHTFPAVLQSSGLYSLSSVVTVPSSSLGTQTYICNVNHKPSNTKVDKKVEPKSCDKTHTCPPCPAPPVAGPSVFLFPPKPKDTLMISRTPEVTCVVVDVKHEDPEVKFNWYVDGVEVHNAKTKPREEQYNSTYRVVSVLTVLHQDWLNGKEYKCKVSNKALPAPIEKTISKAKGQPREPQVYTLPPSREEMTKNQVSLTCLVKGFYPSDIAVEWESNGQPENNYKTTPPVLDSDGSFFLYSKLTVDKSRWQQGNVFSCSVMHEALHNHYTQKSLSLSPGK

SEQ ID NO: 380 - protein, 111 aa, Artificial Sequence; identical to SEQ ID NO: 207
  Description of Artificial Sequence: Synthetic polypeptide
  XENP023057 Jounce_37A10S713[ICOS]_H0L0_IgG1_PVA _/S267K Variable light (vl) domain

SEQ ID NO: 381 - protein, 15 aa, Artificial Sequence
  Description of Artificial Sequence: Synthetic peptide
  XENP023057 Jounce_37A10S713[ICOS]_H0L0_IgG1_PVA_/S267K vlCDR1
KSSQSLLSGSFNYLT

SEQ ID NO: 382 - protein, 7 aa, Artificial Sequence
  Description of Artificial Sequence: Synthetic peptide
  XENP023057 Jounce_37A10S713[ICOS]_H0L0_IgG1_PVA_/S267K vlCDR2
YASTRHT

SEQ ID NO: 383 - protein, 9 aa, Artificial Sequence
  Description of Artificial Sequence: Synthetic peptide
  XENP023057 Jounce_37A10S713[ICOS]_H0L0_IgG1_PVA_/S267K vlCDR3
HHHYNAPPT

SEQ ID NO: 384 - protein, 218 aa, Artificial Sequence; identical to SEQ ID NO: 254
  Description of Artificial Sequence: Synthetic polypeptide
  XENP023057 Jounce_37A10S713[ICOS]_H0L0_IgG1_PVA _/S267K Full length light chain

SEQ ID NO: 385 - protein, 125 aa, Artificial Sequence; identical to SEQ ID NO: 140
  Description of Artificial Sequence: Synthetic polypeptide
  XENP022091 [ICOS]_H0_L0.7_Fab Variable heavy (vh) domain

SEQ ID NO: 386 - protein, 5 aa, Artificial Sequence
  Description of Artificial Sequence: Synthetic peptide
  XENP022091 [ICOS]_H0_L0.7_Fab vhCDR1
GYYMH

SEQ ID NO: 387 - protein, 17 aa, Artificial Sequence
  Description of Artificial Sequence: Synthetic peptide
  XENP022091 [ICOS]_H0_L0.7_Fab vhCDR2
WINPHSGGTNYAQKFQG

SEQ ID NO: 388 - protein, 16 aa, Artificial Sequence
  Description of Artificial Sequence: Synthetic peptide
  XENP022091 [ICOS]_H0_L0.7_Fab vhCDR3
TYYYDSSGYYHDAFDI

SEQ ID NO: 389 - protein, 230 aa, Artificial Sequence
  Description of Artificial Sequence: Synthetic polypeptide
  XENP022091 [ICOS]_H0_L0.7_Fab Full length HC
QVQLVQSGAEVKKPGASVKVSCKASGYTFTGYYMHWVRQAPGQGLEWMGWINPHSGGTNYAQKFQGRVTMTRDTSISTAYMELSRLRSDDTAVYYCARTYYYDSSGYYHDAFDIWGQGTMVTVSSASTKGPSVFPLAPSSKSTSGGTAALGCLVKDYFPEPVTVSWNSGALTSGVHTFPAVLQSSGLYSLSSVVTVPSSSLGTQTYICNVNHKPSNTKVDKKVEPKSCGS

SEQ ID NO: 390 - protein, 107 aa, Artificial Sequence
  Description of Artificial Sequence: Synthetic polypeptide
  XENP022091 [ICOS]_H0_L0.7_Fab Variable light (vl) domain
DIQMTQSPSSVSASVGDRVTITCRASQGISSYLAWYQQKPGKAPKLLIYVASSLQSGVPSRFSGSGSGTDFTLTISSLQPEDFATYYCQQANSFPWTFGQGTKVEIK

SEQ ID NO: 391 - protein, 11 aa, Artificial Sequence
  Description of Artificial Sequence: Synthetic peptide
  XENP022091 [ICOS]_H0_L0.7_Fab vlCDR1
RASQGISSYLA

SEQ ID NO: 392 - protein, 7 aa, Artificial Sequence
  Description of Artificial Sequence: Synthetic peptide
  XENP022091 [ICOS]_H0_L0.7_Fab vlCDR2
VASSLQS

SEQ ID NO: 393 - protein, 9 aa, Artificial Sequence
  Description of Artificial Sequence: Synthetic peptide
  XENP022091 [ICOS]_H0_L0.7_Fab vlCDR3
QQANSFPWT

SEQ ID NO: 394 - protein, 214 aa, Artificial Sequence
  Description of Artificial Sequence: Synthetic polypeptide
  XENP022091 [ICOS]_H0_L0.7_Fab Full length light chain
DIQMTQSPSSVSASVGDRVTITCRASQGISSYLAWYQQKPGKAPKLLIYVASSLQSGVPSRFSGSGSGTDFTLTISSLQPEDFATYYCQQANSFPWTFGQGTKVEIKRTVAAPSVFIFPPSDEQLKSGTASVVCLLNNFYPREAKVQWKVDNALQSGNSQESVTEQDSKDSTYSLSSTLTLSKADYEKHKVYACEVTHQGLSSPVTKSFNRGEC

SEQ ID NO: 395 - protein, 125 aa, Artificial Sequence; identical to SEQ ID NO: 140
  Description of Artificial Sequence: Synthetic polypeptide
  XENP022780 [ICOS]_H0_L0.34_Fab Variable heavy (vh) domain

SEQ ID NO: 396 - protein, 5 aa, Artificial Sequence
  Description of Artificial Sequence: Synthetic peptide
  XENP022780 [ICOS]_H0_L0.34_Fab vhCDR1
GYYMH

SEQ ID NO: 397 - protein, 17 aa, Artificial Sequence
  Description of Artificial Sequence: Synthetic peptide
  XENP022780 [ICOS]_H0_L0.34_Fab vhCDR2
WINPHSGGTNYAQKFQG

SEQ ID NO: 398 - protein, 16 aa, Artificial Sequence
  Description of Artificial Sequence: Synthetic peptide
  XENP022780 [ICOS]_H0_L0.34_Fab vhCDR3
TYYYDSSGYYHDAFDI

SEQ ID NO: 399 - protein, 230 aa, Artificial Sequence; identical to SEQ ID NO: 389
  Description of Artificial Sequence: Synthetic polypeptide
  XENP022780 [ICOS]_H0_L0.34_Fab Full length HC

SEQ ID NO: 400 - protein, 107 aa, Artificial Sequence
  Description of Artificial Sequence: Synthetic polypeptide
  XENP022780 [ICOS]_H0_L0.34_Fab Variable light (vl) domain
DIQMTQSPSSVSASVGDRVTITCQASQDISRLLAWYQQKPGKAPKLLIYVASSLQSGVPSRFSGSGSGTDFTLTISSLQPEDFATYYCQQAESFPWTFGQGTKVEIK

SEQ ID NO: 401 - protein, 11 aa, Artificial Sequence
  Description of Artificial Sequence: Synthetic peptide
  XENP022780 [ICOS]_H0_L0.34_Fab vlCDR1
QASQDISRLLA

SEQ ID NO: 402 - protein, 7 aa, Artificial Sequence
  Description of Artificial Sequence: Synthetic peptide
  XENP022780 [ICOS]_H0_L0.34_Fab vlCDR2
VASSLQS

SEQ ID NO: 403 - protein, 9 aa, Artificial Sequence
  Description of Artificial Sequence: Synthetic peptide
  XENP022780 [ICOS]_H0_L0.34_Fab vlCDR3
QQAESFPWT

SEQ ID NO: 404 - protein, 214 aa, Artificial Sequence
  Description of Artificial Sequence: Synthetic polypeptide
  XENP022780 [ICOS]_H0_L0.34_Fab Full length light chain
DIQMTQSPSSVSASVGDRVTITCQASQDISRLLAWYQQKPGKAPKLLIYVASSLQSGVPSRFSGSGSGTDFTLTISSLQPEDFATYYCQQAESFPWTFGQGTKVEIKRTVAAPSVFIFPPSDEQLKSGTASVVCLLNNFYPREAKVQWKVDNALQSGNSQESVTEQDSKDSTYSLSSTLTLSKADYEKHKVYACEVTHQGLSSPVTKSFNRGEC

SEQ ID NO: 405 - protein, 125 aa, Artificial Sequence; identical to SEQ ID NO: 140
  Description of Artificial Sequence: Synthetic polypeptide
  XENP022782 [ICOS]_H0_L0.36_Fab Variable heavy (vh) domain

SEQ ID NO: 406 - protein, 5 aa, Artificial Sequence
  Description of Artificial Sequence: Synthetic peptide
  XENP022782 [ICOS]_H0_L0.36_Fab vhCDR1
GYYMH

SEQ ID NO: 407 - protein, 17 aa, Artificial Sequence
  Description of Artificial Sequence: Synthetic peptide
  XENP022782 [ICOS]_H0_L0.36_Fab vhCDR2
WINPHSGGTNYAQKFQG

SEQ ID NO: 408 - protein, 16 aa, Artificial Sequence
  Description of Artificial Sequence: Synthetic peptide
  XENP022782 [ICOS]_H0_L0.36_Fab vhCDR3
TYYYDSSGYYHDAFDI

SEQ ID NO: 409 - protein, 230 aa, Artificial Sequence; identical to SEQ ID NO: 389
  Description of Artificial Sequence: Synthetic polypeptide
  XENP022782 [ICOS]_H0_L0.36_Fab Full length HC

SEQ ID NO: 410 - protein, 107 aa, Artificial Sequence
  Description of Artificial Sequence: Synthetic polypeptide
  XENP022782 [ICOS]_H0_L0.36_Fab Variable light (vl) domain
DIQMTQSPSSVSASVGDRVTITCQASQDISSLLAWYQQKPGKAPKLLIYVASSLQSGVPSRFSGSGSGTDFTLTISSLQPEDFATYYCQQAESFPWTFGQGTKVEIK

SEQ ID NO: 411 - protein, 11 aa, Artificial Sequence
  Description of Artificial Sequence: Synthetic peptide
  XENP022782 [ICOS]_H0_L0.36_Fab vlCDR1
QASQDISSLLA

SEQ ID NO: 412 - protein, 7 aa, Artificial Sequence
  Description of Artificial Sequence: Synthetic peptide
  XENP022782 [ICOS]_H0_L0.36_Fab vlCDR2
VASSLQS

SEQ ID NO: 413 - protein, 9 aa, Artificial Sequence
  Description of Artificial Sequence: Synthetic peptide
  XENP022782 [ICOS]_H0_L0.36_Fab vlCDR3
QQAESFPWT

SEQ ID NO: 414 - protein, 214 aa, Artificial Sequence
  Description of Artificial Sequence: Synthetic polypeptide
  XENP022782 [ICOS]_H0_L0.36_Fab Full length light chain
DIQMTQSPSSVSASVGDRVTITCQASQDISSLLAWYQQKPGKAPKLLIYVASSLQSGVPSRFSGSGSGTDFTLTISSLQPEDFATYYCQQAESFPWTFGQGTKVEIKRTVAAPSVFIFPPSDEQLKSGTASVVCLLNNFYPREAKVQWKVDNALQSGNSQESVTEQDSKDSTYSLSSTLTLSKADYEKHKVYACEVTHQGLSSPVTKSFNRGEC

SEQ ID NO: 415 - protein, 125 aa, Artificial Sequence; identical to SEQ ID NO: 140
  Description of Artificial Sequence: Synthetic polypeptide
  XENP022783 [ICOS]_H0_L0.37_Fab Variable heavy (vh) domain

SEQ ID NO: 416 - protein, 5 aa, Artificial Sequence
  Description of Artificial Sequence: Synthetic peptide
  XENP022783 [ICOS]_H0_L0.37_Fab vhCDR1
GYYMH

SEQ ID NO: 417 - protein, 17 aa, Artificial Sequence
  Description of Artificial Sequence: Synthetic peptide
  XENP022783 [ICOS]_H0_L0.37_Fab vhCDR2
WINPHSGGTNYAQKFQG

SEQ ID NO: 418 - protein, 16 aa, Artificial Sequence
  Description of Artificial Sequence: Synthetic peptide
  XENP022783 [ICOS]_H0_L0.37_Fab vhCDR3
TYYYDSSGYYHDAFDI

SEQ ID NO: 419 - protein, 230 aa, Artificial Sequence; identical to SEQ ID NO: 389
  Description of Artificial Sequence: Synthetic polypeptide
  XENP022783 [ICOS]_H0_L0.37_Fab Full length HC

SEQ ID NO: 420 - protein, 107 aa, Artificial Sequence
  Description of Artificial Sequence: Synthetic polypeptide
  XENP022783 [ICOS]_H0_L0.37_Fab Variable light (vl) domain
DIQMTQSPSSVSASVGDRVTITCQASQDISRLLAWYQQKPGKAPKLLIYAASSLQSGVPSRFSGSGSGTDFTLTISSLQPEDFATYYCQQAESFPWTFGQGTKVEIK

SEQ ID NO: 421 - protein, 11 aa, Artificial Sequence
  Description of Artificial Sequence: Synthetic peptide
  XENP022783 [ICOS]_H0_L0.37_Fab vlCDR1
QASQDISRLLA

SEQ ID NO: 422 - protein, 7 aa, Artificial Sequence
  Description of Artificial Sequence: Synthetic peptide
  XENP022783 [ICOS]_H0_L0.37_Fab vlCDR2
AASSLQS

SEQ ID NO: 423 - protein, 9 aa, Artificial Sequence
  Description of Artificial Sequence: Synthetic peptide
  XENP022783 [ICOS]_H0_L0.37_Fab vlCDR3
QQAESFPWT

SEQ ID NO: 424 - protein, 214 aa, Artificial Sequence
  Description of Artificial Sequence: Synthetic polypeptide
  XENP022783 [ICOS]_H0_L0.37_Fab Full length light chain
DIQMTQSPSSVSASVGDRVTITCQASQDISRLLAWYQQKPGKAPKLLIYAASSLQSGVPSRFSGSGSGTDFTLTISSLQPEDFATYYCQQAESFPWTFGQGTKVEIKRTVAAPSVFIFPPSDEQLKSGTASVVCLLNNFYPREAKVQWKVDNALQSGNSQESVTEQDSKDSTYSLSSTLTLSKADYEKHKVYACEVTHQGLSSPVTKSFNRGEC

SEQ ID NO: 425 - protein, 125 aa, Artificial Sequence; identical to SEQ ID NO: 140
  Description of Artificial Sequence: Synthetic polypeptide
  XENP022784 [ICOS]_H0_L0.38_Fab Variable heavy (vh) domain

SEQ ID NO: 426 - protein, 5 aa, Artificial Sequence
  Description of Artificial Sequence: Synthetic peptide
  XENP022784 [ICOS]_H0_L0.38_Fab vhCDR1
GYYMH

SEQ ID NO: 427 - protein, 17 aa, Artificial Sequence
  Description of Artificial Sequence: Synthetic peptide
  XENP022784 [ICOS]_H0_L0.38_Fab vhCDR2
WINPHSGGTNYAQKFQG

SEQ ID NO: 428 - protein, 16 aa, Artificial Sequence
  Description of Artificial Sequence: Synthetic peptide
  XENP022784 [ICOS]_H0_L0.38_Fab vhCDR3
TYYYDSSGYYHDAFDI

SEQ ID NO: 429 - protein, 230 aa, Artificial Sequence; identical to SEQ ID NO: 389
  Description of Artificial Sequence: Synthetic polypeptide
  XENP022784 [ICOS]_H0_L0.38_Fab Full length HC

SEQ ID NO: 430 - protein, 107 aa, Artificial Sequence
  Description of Artificial Sequence: Synthetic polypeptide
  XENP022784 [ICOS]_H0_L0.38_Fab Variable light (vl) domain
DIQMTQSPSSVSASVGDRVTITCQASQDISSLLAWYQQKPGKAPKLLIYAASSLQSGVPSRFSGSGSGTDFTLTISSLQPEDFATYYCQQAESFPWTFGQGTKVEIK

SEQ ID NO: 431 - protein, 11 aa, Artificial Sequence
  Description of Artificial Sequence: Synthetic peptide
  XENP022784 [ICOS]_H0_L0.38_Fab vlCDR1
QASQDISSLLA

SEQ ID NO: 432 - protein, 7 aa, Artificial Sequence
  Description of Artificial Sequence: Synthetic peptide
  XENP022784 [ICOS]_H0_L0.38_Fab vlCDR2
AASSLQS

SEQ ID NO: 433 - protein, 9 aa, Artificial Sequence
  Description of Artificial Sequence: Synthetic peptide
  XENP022784 [ICOS]_H0_L0.38_Fab vlCDR3
QQAESFPWT

SEQ ID NO: 434 - protein, 214 aa, Artificial Sequence
  Description of Artificial Sequence: Synthetic polypeptide
  XENP022784 [ICOS]_H0_L0.38_Fab Full length light chain
DIQMTQSPSSVSASVGDRVTITCQASQDISSLLAWYQQKPGKAPKLLIYAASSLQSGVPSRFSGSGSGTDFTLTISSLQPEDFATYYCQQAESFPWTFGQGTKVEIKRTVAAPSVFIFPPSDEQLKSGTASVVCLLNNFYPREAKVQWKVDNALQSGNSQESVTEQDSKDSTYSLSSTLTLSKADYEKHKVYACEVTHQGLSSPVTKSFNRGEC

SEQ ID NO: 435 - protein, 125 aa, Artificial Sequence; identical to SEQ ID NO: 142
  Description of Artificial Sequence: Synthetic polypeptide
  XENP023088 [ICOS]_H0.66_L0_Fab Variable heavy (vh) domain

SEQ ID NO: 436 - protein, 5 aa, Artificial Sequence
  Description of Artificial Sequence: Synthetic peptide
  XENP023088 [ICOS]_H0.66_L0_Fab vhCDR1
GYYMH

SEQ ID NO: 437 - protein, 17 aa, Artificial Sequence
  Description of Artificial Sequence: Synthetic peptide
  XENP023088 [ICOS]_H0.66_L0_Fab vhCDR2
WINPHSGETIYAQKFQG

SEQ ID NO: 438 - protein, 16 aa, Artificial Sequence
  Description of Artificial Sequence: Synthetic peptide
  XENP023088 [ICOS]_H0.66_L0_Fab vhCDR3
TYYYDTSGYYHDAFDV

SEQ ID NO: 439 - protein, 230 aa, Artificial Sequence
  Description of Artificial Sequence: Synthetic polypeptide
  XENP023088 [ICOS]_H0.66_L0_Fab Full length HC
QVQLVQSGAEVKKPGASVKVSCKASGYTFTGYYMHWVRQAPGQGLEWMGWINPHSGETIYAQKFQGRVTMTRDTSISTAYMELSSLRSEDTAVYYCARTYYYDTSGYYHDAFDVWGQGTMVTVSSASTKGPSVFPLAPSSKSTSGGTAALGCLVKDYFPEPVTVSWNSGALTSGVHTFPAVLQSSGLYSLSSVVTVPSSSLGTQTYICNVNHKPSNTKVDKKVEPKSCGS

SEQ ID NO: 440 - protein, 107 aa, Artificial Sequence; identical to SEQ ID NO: 141
  Description of Artificial Sequence: Synthetic polypeptide
  XENP023088 [ICOS]_H0.66_L0_Fab Variable light (vl) domain

SEQ ID NO: 441 - protein, 11 aa, Artificial Sequence
  Description of Artificial Sequence: Synthetic peptide
  XENP023088 [ICOS]_H0.66_L0_Fab vlCDR1
RASQGISRLLA

SEQ ID NO: 442 - protein, 7 aa, Artificial Sequence
  Description of Artificial Sequence: Synthetic peptide
  XENP023088 [ICOS]_H0.66_L0_Fab vlCDR2
VASSLQS

SEQ ID NO: 443 - protein, 9 aa, Artificial Sequence
  Description of Artificial Sequence: Synthetic peptide
  XENP023088 [ICOS]_H0.66_L0_Fab vlCDR3
QQANSFPWT

SEQ ID NO: 444 - protein, 214 aa, Artificial Sequence; identical to SEQ ID NO: 146
  Description of Artificial Sequence: Synthetic polypeptide
  XENP023088 [ICOS]_H0.66_L0_Fab Full length light chain

SEQ ID NO: 445 - protein, 125 aa, Artificial Sequence; identical to SEQ ID NO: 142
  Description of Artificial Sequence: Synthetic polypeptide
  XENP023409 [ICOS]_H0.66_L0.34_Fab Variable heavy (vh) domain

SEQ ID NO: 446 - protein, 5 aa, Artificial Sequence
  Description of Artificial Sequence: Synthetic peptide
  XENP023409 [ICOS]_H0.66_L0.34_Fab vhCDR1
GYYMH

SEQ ID NO: 447 - protein, 17 aa, Artificial Sequence
  Description of Artificial Sequence: Synthetic peptide
  XENP023409 [ICOS]_H0.66_L0.34_Fab vhCDR2
WINPHSGETIYAQKFQG

SEQ ID NO: 448 - protein, 16 aa, Artificial Sequence
  Description of Artificial Sequence: Synthetic peptide
  XENP023409 [ICOS]_H0.66_L0.34_Fab vhCDR3
TYYYDTSGYYHDAFDV

SEQ ID NO: 449 - protein, 230 aa, Artificial Sequence; identical to SEQ ID NO: 439
  Description of Artificial Sequence: Synthetic polypeptide
  XENP023409 [ICOS]_H0.66_L0.34_Fab Full length HC

SEQ ID NO: 450 - protein, 107 aa, Artificial Sequence; identical to SEQ ID NO: 400
  Description of Artificial Sequence: Synthetic polypeptide
  XENP023409 [ICOS]_H0.66_L0.34_Fab Variable light (vl) domain

SEQ ID NO: 451 - protein, 11 aa, Artificial Sequence
  Description of Artificial Sequence: Synthetic peptide
  XENP023409 [ICOS]_H0.66_L0.34_Fab vlCDR1
QASQDISRLLA

SEQ ID NO: 452 - protein, 7 aa, Artificial Sequence
  Description of Artificial Sequence: Synthetic peptide
  XENP023409 [ICOS]_H0.66_L0.34_Fab vlCDR2
VASSLQS

SEQ ID NO: 453 - protein, 9 aa, Artificial Sequence
  Description of Artificial Sequence: Synthetic peptide
  XENP023409 [ICOS]_H0.66_L0.34_Fab vlCDR3
QQAESFPWT

SEQ ID NO: 454 - protein, 214 aa, Artificial Sequence; identical to SEQ ID NO: 404
  Description of Artificial Sequence: Synthetic polypeptide
  XENP023409 [ICOS]_H0.66_L0.34_Fab Full length light chain

SEQ ID NO: 455 - protein, 125 aa, Artificial Sequence; identical to SEQ ID NO: 140
  Description of Artificial Sequence: Synthetic polypeptide
  XENP024352 [anti-ICOS]_H0L0_scFv Variable heavy (vh) domain

SEQ ID NO: 456 - protein, 5 aa, Artificial Sequence
  Description of Artificial Sequence: Synthetic peptide
  XENP024352 [anti-ICOS]_H0L0_scFv vhCDR1
GYYMH

SEQ ID NO: 457 - protein, 17 aa, Artificial Sequence
  Description of Artificial Sequence: Synthetic peptide
  XENP024352 [anti-ICOS]_H0L0_scFv vhCDR2
WINPHSGGTNYAQKFQG

SEQ ID NO: 458 - protein, 16 aa, Artificial Sequence
  Description of Artificial Sequence: Synthetic peptide
  XENP024352 [anti-ICOS]_H0L0_scFv vhCDR3
TYYYDSSGYYHDAFDI

SEQ ID NO: 459 - protein, 20 aa, Artificial Sequence
  Description of Artificial Sequence: Synthetic peptide
  XENP024352 [anti-ICOS]_H0L0_scFv scFv linker
GKPGSGKPGSGKPGSGKPGS

SEQ ID NO: 460 - protein, 107 aa, Artificial Sequence; identical to SEQ ID NO: 141
  Description of Artificial Sequence: Synthetic polypeptide
  XENP024352 [anti-ICOS]_H0L0_scFv Variable light (vl) domain

SEQ ID NO: 461 - protein, 11 aa, Artificial Sequence
  Description of Artificial Sequence: Synthetic peptide
  XENP024352 [anti-ICOS]_H0L0_scFv vlCDR1
RASQGISRLLA

SEQ ID NO: 462 - protein, 7 aa, Artificial Sequence
  Description of Artificial Sequence: Synthetic peptide
  XENP024352 [anti-ICOS]_H0L0_scFv vlCDR2
VASSLQS

SEQ ID NO: 463 - protein, 9 aa, Artificial Sequence
  Description of Artificial Sequence: Synthetic peptide
  XENP024352 [anti-ICOS]_H0L0_scFv vlCDR3
QQANSFPWT

SEQ ID NO: 464 - protein, 254 aa, Artificial Sequence
  Description of Artificial Sequence: Synthetic polypeptide
  XENP024352 [anti-ICOS]_H0L0_scFv scFv
QVQLVQSGAEVKKPGASVKVSCKASGYTFTGYYMHWVRQAPGQGLEWMGWINPHSGGTNYAQKFQGRVTMTRDTSISTAYMELSRLRSDDTAVYYCARTYYYDSSGYYHDAFDIWGQGTMVTVSSGKPGSGKPGSGKPGSGKPGSDIQMTQSPSSVSASVGDRVTITCRASQGISRLLAWYQQKPGKAPKLLIYVASSLQSGVPSRFSGSGSGTDFTLTISSLQPEDFATYYCQQANSFPWTFGQGTKVEIKGS

SEQ ID NO: 465 - protein, 125 aa, Artificial Sequence; identical to SEQ ID NO: 140
  Description of Artificial Sequence: Synthetic polypeptide
  XENP024353 [anti-ICOS]_L0H0_scFv Variable heavy (vh) domain

SEQ ID NO: 466 - protein, 5 aa, Artificial Sequence
  Description of Artificial Sequence: Synthetic peptide
  XENP024353 [anti-ICOS]_L0H0_scFv vhCDR1
GYYMH

SEQ ID NO: 467 - protein, 17 aa, Artificial Sequence
  Description of Artificial Sequence: Synthetic peptide
  XENP024353 [anti-ICOS]_L0H0_scFv vhCDR2
WINPHSGGTNYAQKFQG

SEQ ID NO: 468 - protein, 16 aa, Artificial Sequence
  Description of Artificial Sequence: Synthetic peptide
  XENP024353 [anti-ICOS]_L0H0_scFv vhCDR3
TYYYDSSGYYHDAFDI

SEQ ID NO: 469 - protein, 20 aa, Artificial Sequence
  Description of Artificial Sequence: Synthetic peptide
  XENP024353 [anti-ICOS]_L0H0_scFv scFv linker
GKPGSGKPGSGKPGSGKPGS

SEQ ID NO: 470 - protein, 107 aa, Artificial Sequence; identical to SEQ ID NO: 141
  Description of Artificial Sequence: Synthetic polypeptide
  XENP024353 [anti-ICOS]_L0H0_scFv Variable light (vl) domain

SEQ ID NO: 471 - protein, 11 aa, Artificial Sequence
  Description of Artificial Sequence: Synthetic peptide
  XENP024353 [anti-ICOS]_L0H0_scFv vlCDR1
RASQGISRLLA

SEQ ID NO: 472 - protein, 7 aa, Artificial Sequence
  Description of Artificial Sequence: Synthetic peptide
  XENP024353 [anti-ICOS]_L0H0_scFv vlCDR2
VASSLQS

SEQ ID NO: 473 - protein, 9 aa, Artificial Sequence
  Description of Artificial Sequence: Synthetic peptide
  XENP024353 [anti-ICOS]_L0H0_scFv vlCDR3
QQANSFPWT

SEQ ID NO: 474 - protein, 254 aa, Artificial Sequence
  Description of Artificial Sequence: Synthetic polypeptide
  XENP024353 [anti-ICOS]_L0H0_scFv scFv
DIQMTQSPSSVSASVGDRVTITCRASQGISRLLAWYQQKPGKAPKLLIYVASSLQSGVPSRFSGSGSGTDFTLTISSLQPEDFATYYCQQANSFPWTFGQGTKVEIKGKPGSGKPGSGKPGSGKPGSQVQLVQSGAEVKKPGASVKVSCKASGYTFTGYYMHWVRQAPGQGLEWMGWINPHSGGTNYAQKFQGRVTMTRDTSISTAYMELSRLRSDDTAVYYCARTYYYDSSGYYHDAFDIWGQGTMVTVSSGS

SEQ ID NO: 475 - protein, 125 aa, Artificial Sequence
  Description of Artificial Sequence: Synthetic polypeptide
  XENP024354 [anti-ICOS]_H0.40_L0.22 _scFv Variable heavy (vh) domain
QVQLVQSGAEVKKPGASVKVSCKASGYTFTGYYMHWVRQAPGQGLEWMGWINPHSGETNYAQKFQGRVTMTRDTSISTAYMELSSLRSEDTAVYYCARTYYYDTSGYYHDAFDVWGQGTMVTVSS

SEQ ID NO: 476 - protein, 5 aa, Artificial Sequence
  Description of Artificial Sequence: Synthetic peptide
  XENP024354 [anti-ICOS]_H0.40_L0.22_scFv vhCDR1
GYYMH

SEQ ID NO: 477 - protein, 17 aa, Artificial Sequence
  Description of Artificial Sequence: Synthetic peptide
  XENP024354 [anti-ICOS]_H0.40_L0.22_scFv vhCDR2
WINPHSGETNYAQKFQG

SEQ ID NO: 478 - protein, 16 aa, Artificial Sequence
  Description of Artificial Sequence: Synthetic peptide
  XENP024354 [anti-ICOS]_H0.40_L0.22_scFv vhCDR3
TYYYDTSGYYHDAFDV

SEQ ID NO: 479 - protein, 20 aa, Artificial Sequence
  Description of Artificial Sequence: Synthetic peptide
  XENP024354 [anti-ICOS]_H0.40_L0.22_scFv scFv linker
GKPGSGKPGSGKPGSGKPGS

SEQ ID NO: 480 - protein, 107 aa, Artificial Sequence
  Description of Artificial Sequence: Synthetic polypeptide
  XENP024354 [anti-ICOS]_H0.40_L0.22 _scFv Variable light (vl) domain
DIQMTQSPSSVSASVGDRVTITCRASQDISRLLAWYQQKPGKAPKLLIYAASSLQSGVPSRFSGSGSGTDFTLTISSLQPEDFATYYCQQANSFPWTFGQGTKVEIK

SEQ ID NO: 481 - protein, 11 aa, Artificial Sequence
  Description of Artificial Sequence: Synthetic peptide
  XENP024354 [anti-ICOS]_H0.40_L0.22_scFv vlCDR1
RASQDISRLLA

SEQ ID NO: 482 - protein, 7 aa, Artificial Sequence
  Description of Artificial Sequence: Synthetic peptide
  XENP024354 [anti-ICOS]_H0.40_L0.22_scFv vlCDR2
AASSLQS

SEQ ID NO: 483 - protein, 9 aa, Artificial Sequence
  Description of Artificial Sequence: Synthetic peptide
  XENP024354 [anti-ICOS]_H0.40_L0.22_scFv vlCDR3
QQANSFPWT

SEQ ID NO: 484 - protein, 254 aa, Artificial Sequence
  Description of Artificial Sequence: Synthetic polypeptide
  XENP024354 [anti-ICOS]_H0.40_L0.22_scFv scFv
QVQLVQSGAEVKKPGASVKVSCKASGYTFTGYYMHWVRQAPGQGLEWMGWINPHSGETNYAQKFQGRVTMTRDTSISTAYMELSSLRSEDTAVYYCARTYYYDTSGYYHDAFDVWGQGTMVTVSSGKPGSGKPGSGKPGSGKPGSDIQMTQSPSSVSASVGDRVTITCRASQDISRLLAWYQQKPGKAPKLLIYAASSLQSGVPSRFSGSGSGTDFTLTISSLQPEDFATYYCQQANSFPWTFGQGTKVEIKGS

SEQ ID NO: 485 - protein, 125 aa, Artificial Sequence; identical to SEQ ID NO: 475
  Description of Artificial Sequence: Synthetic polypeptide
  XENP024355 [anti-ICOS]_H0.40_L0.45 _scFv Variable heavy (vh) domain

SEQ ID NO: 486 - protein, 5 aa, Artificial Sequence
  Description of Artificial Sequence: Synthetic peptide
  XENP024355 [anti-ICOS]_H0.40_L0.45_scFv vhCDR1
GYYMH

SEQ ID NO: 487 - protein, 17 aa, Artificial Sequence
  Description of Artificial Sequence: Synthetic peptide
  XENP024355 [anti-ICOS]_H0.40_L0.45_scFv vhCDR2
WINPHSGETNYAQKFQG

SEQ ID NO: 488 - protein, 16 aa, Artificial Sequence
  Description of Artificial Sequence: Synthetic peptide
  XENP024355 [anti-ICOS]_H0.40_L0.45_scFv vhCDR3
TYYYDTSGYYHDAFDV

SEQ ID NO: 489 - protein, 20 aa, Artificial Sequence
  Description of Artificial Sequence: Synthetic peptide
  XENP024355 [anti-ICOS]_H0.40_L0.45_scFv scFv linker
GKPGSGKPGSGKPGSGKPGS

SEQ ID NO: 490 - protein, 107 aa, Artificial Sequence
  Description of Artificial Sequence: Synthetic polypeptide
  XENP024355 [anti-ICOS]_H0.40_L0.45 _scFv Variable light (vl) domain
DIQMTQSPSSVSASVGDRVTITCRASQDISRLLAWYQQKPGKAPKLLIYAASSLQSGVPSRFSGSGSGTDFTLTISSLQPEDFATYYCQQAQSFPWTFGQGTKVEIK

SEQ ID NO: 491 - protein, 11 aa, Artificial Sequence
  Description of Artificial Sequence: Synthetic peptide
  XENP024355 [anti-ICOS]_H0.40_L0.45_scFv vlCDR1
RASQDISRLLA

SEQ ID NO: 492 - protein, 7 aa, Artificial Sequence
  Description of Artificial Sequence: Synthetic peptide
  XENP024355 [anti-ICOS]_H0.40_L0.45_scFv vlCDR2
AASSLQS

SEQ ID NO: 493 - protein, 9 aa, Artificial Sequence
  Description of Artificial Sequence: Synthetic peptide
  XENP024355 [anti-ICOS]_H0.40_L0.45_scFv vlCDR3
QQAQSFPWT

SEQ ID NO: 494 - protein, 254 aa, Artificial Sequence
  Description of Artificial Sequence: Synthetic polypeptide
  XENP024355 [anti-ICOS]_H0.40_L0.45_scFv scFv
QVQLVQSGAEVKKPGASVKVSCKASGYTFTGYYMHWVRQAPGQGLEWMGWINPHSGETNYAQKFQGRVTMTRDTSISTAYMELSSLRSEDTAVYYCARTYYYDTSGYYHDAFDVWGQGTMVTVSSGKPGSGKPGSGKPGSGKPGSDIQMTQSPSSVSASVGDRVTITCRASQDISRLLAWYQQKPGKAPKLLIYAASSLQSGVPSRFSGSGSGTDFTLTISSLQPEDFATYYCQQAQSFPWTFGQGTKVEIKGS

SEQ ID NO: 495 - protein, 125 aa, Artificial Sequence; identical to SEQ ID NO: 142
  Description of Artificial Sequence: Synthetic polypeptide
  XENP024356 [anti-ICOS]_H0.66_L0.22 _scFv Variable heavy (vh) domain

SEQ ID NO: 496 - protein, 5 aa, Artificial Sequence
  Description of Artificial Sequence: Synthetic peptide
  XENP024356 [anti-ICOS]_H0.66_L0.22_scFv vhCDR1
GYYMH

SEQ ID NO: 497 - protein, 17 aa, Artificial Sequence
  Description of Artificial Sequence: Synthetic peptide
  XENP024356 [anti-ICOS]_H0.66_L0.22_scFv vhCDR2
WINPHSGETIYAQKFQG

SEQ ID NO: 498 - protein, 16 aa, Artificial Sequence
  Description of Artificial Sequence: Synthetic peptide
  XENP024356 [anti-ICOS]_H0.66_L0.22_scFv vhCDR3
TYYYDTSGYYHDAFDV

SEQ ID NO: 499 - protein, 20 aa, Artificial Sequence
  Description of Artificial Sequence: Synthetic peptide
  XENP024356 [anti-ICOS]_H0.66_L0.22_scFv scFv linker
GKPGSGKPGSGKPGSGKPGS

SEQ ID NO: 500 - protein, 107 aa, Artificial Sequence; identical to SEQ ID NO: 480
  Description of Artificial Sequence: Synthetic polypeptide
  XENP024356 [anti-ICOS]_H0.66_L0.22 _scFv Variable light (vl) domain

SEQ ID NO: 501 - protein, 11 aa, Artificial Sequence
  Description of Artificial Sequence: Synthetic peptide
  XENP024356 [anti-ICOS]_H0.66_L0.22_scFv vlCDR1
RASQDISRLLA

SEQ ID NO: 502 - protein, 7 aa, Artificial Sequence
  Description of Artificial Sequence: Synthetic peptide
  XENP024356 [anti-ICOS]_H0.66_L0.22_scFv vlCDR2
AASSLQS

SEQ ID NO: 503 - protein, 9 aa, Artificial Sequence
  Description of Artificial Sequence: Synthetic peptide
  XENP024356 [anti-ICOS]_H0.66_L0.22_scFv vlCDR3
QQANSFPWT

SEQ ID NO: 504 - protein, 254 aa, Artificial Sequence
  Description of Artificial Sequence: Synthetic polypeptide
  XENP024356 [anti-ICOS]_H0.66_L0.22_scFv scFv
QVQLVQSGAEVKKPGASVKVSCKASGYTFTGYYMHWVRQAPGQGLEWMGWINPHSGETIYAQKFQGRVTMTRDTSISTAYMELSSLRSEDTAVYYCARTYYYDTSGYYHDAFDVWGQGTMVTVSSGKPGSGKPGSGKPGSGKPGSDIQMTQSPSSVSASVGDRVTITCRASQDISRLLAWYQQKPGKAPKLLIYAASSLQSGVPSRFSGSGSGTDFTLTISSLQPEDFATYYCQQANSFPWTFGQGTKVEIKGS

SEQ ID NO: 505 - protein, 125 aa, Artificial Sequence; identical to SEQ ID NO: 142
  Description of Artificial Sequence: Synthetic polypeptide
  XENP024357 [anti-ICOS]_H0.66_L0.45 _scFv Variable heavy (vh) domain

SEQ ID NO: 506 - protein, 5 aa, Artificial Sequence
  Description of Artificial Sequence: Synthetic peptide
  XENP024357 [anti-ICOS]_H0.66_L0.45_scFv vhCDR1
GYYMH

SEQ ID NO: 507 - protein, 17 aa, Artificial Sequence
  Description of Artificial Sequence: Synthetic peptide
  XENP024357 [anti-ICOS]_H0.66_L0.45_scFv vhCDR2
WINPHSGETIYAQKFQG

SEQ ID NO: 508 - protein, 16 aa, Artificial Sequence
  Description of Artificial Sequence: Synthetic peptide
  XENP024357 [anti-ICOS]_H0.66_L0.45_scFv vhCDR3
TYYYDTSGYYHDAFDV

SEQ ID NO: 509 - protein, 20 aa, Artificial Sequence
  Description of Artificial Sequence: Synthetic peptide
  XENP024357 [anti-ICOS]_H0.66_L0.45_scFv scFv linker
GKPGSGKPGSGKPGSGKPGS

SEQ ID NO: 510 - protein, 107 aa, Artificial Sequence; identical to SEQ ID NO: 490
  Description of Artificial Sequence: Synthetic polypeptide
  XENP024357 [anti-ICOS]_H0.66_L0.45 _scFv Variable light (vl) domain

SEQ ID NO: 511 - protein, 11 aa, Artificial Sequence
  Description of Artificial Sequence: Synthetic peptide
  XENP024357 [anti-ICOS]_H0.66_L0.45_scFv vlCDR1
RASQDISRLLA

SEQ ID NO: 512 - protein, 7 aa, Artificial Sequence
  Description of Artificial Sequence: Synthetic peptide
  XENP024357 [anti-ICOS]_H0.66_L0.45_scFv vlCDR2
AASSLQS

SEQ ID NO: 513 - protein, 9 aa, Artificial Sequence
  Description of Artificial Sequence: Synthetic peptide
  XENP024357 [anti-ICOS]_H0.66_L0.45_scFv vlCDR3
QQAQSFPWT

SEQ ID NO: 514 - protein, 254 aa, Artificial Sequence
  Description of Artificial Sequence: Synthetic polypeptide
  XENP024357 [anti-ICOS]_H0.66_L0.45_scFv scFv
QVQLVQSGAEVKKPGASVKVSCKASGYTFTGYYMHWVRQAPGQGLEWMGWINPHSGETIYAQKFQGRVTMTRDTSISTAYMELSSLRSEDTAVYYCARTYYYDTSGYYHDAFDVWGQGTMVTVSSGKPGSGKPGSGKPGSGKPGSDIQMTQSPSSVSASVGDRVTITCRASQDISRLLAWYQQKPGKAPKLLIYAASSLQSGVPSRFSGSGSGTDFTLTISSLQPEDFATYYCQQAQSFPWTFGQGTKVEIKGS

SEQ ID NO: 515 - protein, 125 aa, Artificial Sequence; identical to SEQ ID NO: 475
  Description of Artificial Sequence: Synthetic polypeptide
  XENP024609 [anti-ICOS]_L0.45_H0.40 _scFv Variable heavy (vh) domain

SEQ ID NO: 516 - protein, 5 aa, Artificial Sequence
  Description of Artificial Sequence: Synthetic peptide
  XENP024609 [anti-ICOS]_L0.45_H0.40_scFv vhCDR1
GYYMH

SEQ ID NO: 517 - protein, 17 aa, Artificial Sequence
  Description of Artificial Sequence: Synthetic peptide
  XENP024609 [anti-ICOS]_L0.45_H0.40_scFv vhCDR2
WINPHSGETNYAQKFQG

SEQ ID NO: 518 - protein, 16 aa, Artificial Sequence
  Description of Artificial Sequence: Synthetic peptide
  XENP024609 [anti-ICOS]_L0.45_H0.40_scFv vhCDR3
TYYYDTSGYYHDAFDV

SEQ ID NO: 519 - protein, 20 aa, Artificial Sequence
  Description of Artificial Sequence: Synthetic peptide
  XENP024609 [anti-ICOS]_L0.45_H0.40_scFv scFv linker
GKPGSGKPGSGKPGSGKPGS

SEQ ID NO: 520 - protein, 107 aa, Artificial Sequence; identical to SEQ ID NO: 490
  Description of Artificial Sequence: Synthetic polypeptide
  XENP024609 [anti-ICOS]_L0.45_H0.40 _scFv Variable light (vl) domain

SEQ ID NO: 521 - protein, 11 aa, Artificial Sequence
  Description of Artificial Sequence: Synthetic peptide
  XENP024609 [anti-ICOS]_L0.45_H0.40_scFv vlCDR1
RASQDISRLLA

SEQ ID NO: 522 - protein, 7 aa, Artificial Sequence
  Description of Artificial Sequence: Synthetic peptide
  XENP024609 [anti-ICOS]_L0.45_H0.40_scFv vlCDR2
AASSLQS

SEQ ID NO: 523 - protein, 9 aa, Artificial Sequence
  Description of Artificial Sequence: Synthetic peptide
  XENP024609 [anti-ICOS]_L0.45_H0.40_scFv vlCDR3
QQAQSFPWT

SEQ ID NO: 524 - protein, 254 aa, Artificial Sequence
  Description of Artificial Sequence: Synthetic polypeptide
  XENP024609 [anti-ICOS]_L0.45_H0.40_scFv scFv
DIQMTQSPSSVSASVGDRVTITCRASQDISRLLAWYQQKPGKAPKLLIYAASSLQSGVPSRFSGSGSGTDFTLTISSLQPEDFATYYCQQAQSFPWTFGQGTKVEIKGKPGSGKPGSGKPGSGKPGSQVQLVQSGAEVKKPGASVKVSCKASGYTFTGYYMHWVRQAPGQGLEWMGWINPHSGETNYAQKFQGRVTMTRDTSISTAYMELSSLRSEDTAVYYCARTYYYDTSGYYHDAFDVWGQGTMVTVSSGS

SEQ ID NO: 525 - protein, 125 aa, Artificial Sequence
  Description of Artificial Sequence: Synthetic polypeptide
  XENP024689 [anti-ICOS]_L0.45_H0.37 _scFv Variable heavy (vh) domain
QVQLVQSGAEVKKPGASVKVSCKASGYTFTGYYMHWVRQAPGQGLEWMGWINPHSGGTNYAQKFQGRVTMTRDTSISTAYMELSSLRSEDTAVYYCARTYYYDTSGYYHDAFDVWGQGTMVTVSS

SEQ ID NO: 526 - protein, 5 aa, Artificial Sequence
  Description of Artificial Sequence: Synthetic peptide
  XENP024689 [anti-ICOS]_L0.45_H0.37_scFv vhCDR1
GYYMH

SEQ ID NO: 527 - protein, 17 aa, Artificial Sequence
  Description of Artificial Sequence: Synthetic peptide
  XENP024689 [anti-ICOS]_L0.45_H0.37_scFv vhCDR2
WINPHSGGTNYAQKFQG

SEQ ID NO: 528 - protein, 16 aa, Artificial Sequence
  Description of Artificial Sequence: Synthetic peptide
  XENP024689 [anti-ICOS]_L0.45_H0.37_scFv vhCDR3
TYYYDTSGYYHDAFDV

SEQ ID NO: 529 - protein, 20 aa, Artificial Sequence
  Description of Artificial Sequence: Synthetic peptide
  XENP024689 [anti-ICOS]_L0.45_H0.37_scFv scFv linker
GKPGSGKPGSGKPGSGKPGS

SEQ ID NO: 530 - protein, 107 aa, Artificial Sequence; identical to SEQ ID NO: 490
  Description of Artificial Sequence: Synthetic polypeptide
  XENP024689 [anti-ICOS]_L0.45_H0.37 _scFv Variable light (vl) domain

SEQ ID NO: 531 - protein, 11 aa, Artificial Sequence
  Description of Artificial Sequence: Synthetic peptide
  XENP024689 [anti-ICOS]_L0.45_H0.37_scFv vlCDR1
RASQDISRLLA

SEQ ID NO: 532 - protein, 7 aa, Artificial Sequence
  Description of Artificial Sequence: Synthetic peptide
  XENP024689 [anti-ICOS]_L0.45_H0.37_scFv vlCDR2
AASSLQS

SEQ ID NO: 533 - protein, 9 aa, Artificial Sequence
  Description of Artificial Sequence: Synthetic peptide
  XENP024689 [anti-ICOS]_L0.45_H0.37_scFv vlCDR3
QQAQSFPWT

SEQ ID NO: 534 - protein, 254 aa, Artificial Sequence
  Description of Artificial Sequence: Synthetic polypeptide
  XENP024689 [anti-ICOS]_L0.45_H0.37_scFv scFv
DIQMTQSPSSVSASVGDRVTITCRASQDISRLLAWYQQKPGKAPKLLIYAASSLQSGVPSRFSGSGSGTDFTLTISSLQPEDFATYYCQQAQSFPWTFGQGTKVEIKGKPGSGKPGSGKPGSGKPGSQVQLVQSGAEVKKPGASVKVSCKASGYTFTGYYMHWVRQAPGQGLEWMGWINPHSGGTNYAQKFQGRVTMTRDTSISTAYMELSSLRSEDTAVYYCARTYYYDTSGYYHDAFDVWGQGTMVTVSSGS

SEQ ID NO: 535 - protein, 125 aa, Artificial Sequence
  Description of Artificial Sequence: Synthetic polypeptide
  XENP024690 [anti-ICOS]_L0.45_H0.68 _scFv Variable heavy (vh) domain
QVQLVQSGAEVKKPGASVKVSCKASGYTFTGYYMHWVRQAPGQGLEWMGWINPHSGETNYAQKFQGRVTMTRDTSISTAYMELSRLRSDDTAVYYCARTYYYDTSGYYHDAFDVWGQGTMVTVSS

SEQ ID NO: 536 - protein, 5 aa, Artificial Sequence
  Description of Artificial Sequence: Synthetic peptide
  XENP024690 [anti-ICOS]_L0.45_H0.68_scFv vhCDR1
GYYMH

SEQ ID NO: 537 - protein, 17 aa, Artificial Sequence
  Description of Artificial Sequence: Synthetic peptide
  XENP024690 [anti-ICOS]_L0.45_H0.68_scFv vhCDR2
WINPHSGETNYAQKFQG

SEQ ID NO: 538 - protein, 16 aa, Artificial Sequence
  Description of Artificial Sequence: Synthetic peptide
  XENP024690 [anti-ICOS]_L0.45_H0.68_scFv vhCDR3
TYYYDTSGYYHDAFDV

SEQ ID NO: 539 - protein, 20 aa, Artificial Sequence
  Description of Artificial Sequence: Synthetic peptide
  XENP024690 [anti-ICOS]_L0.45_H0.68_scFv scFv linker
GKPGSGKPGSGKPGSGKPGS

SEQ ID NO: 540 - protein, 107 aa, Artificial Sequence; identical to SEQ ID NO: 490
  Description of Artificial Sequence: Synthetic polypeptide
  XENP024690 [anti-ICOS]_L0.45_H0.68 _scFv Variable light (vl) domain

SEQ ID NO: 541 - protein, 11 aa, Artificial Sequence
  Description of Artificial Sequence: Synthetic peptide
  XENP024690 [anti-ICOS]_L0.45_H0.68_scFv vlCDR1
RASQDISRLLA

SEQ ID NO: 542 - protein, 7 aa, Artificial Sequence
  Description of Artificial Sequence: Synthetic peptide
  XENP024690 [anti-ICOS]_L0.45_H0.68_scFv vlCDR2
AASSLQS

SEQ ID NO: 543 - protein, 9 aa, Artificial Sequence
  Description of Artificial Sequence: Synthetic peptide
  XENP024690 [anti-ICOS]_L0.45_H0.68_scFv vlCDR3
QQAQSFPWT

SEQ ID NO: 544 - protein, 254 aa, Artificial Sequence
  Description of Artificial Sequence: Synthetic polypeptide
  XENP024690 [anti-ICOS]_L0.45_H0.68_scFv scFv
DIQMTQSPSSVSASVGDRVTITCRASQDISRLLAWYQQKPGKAPKLLIYAASSLQSGVPSRFSGSGSGTDFTLTISSLQPEDFATYYCQQAQSFPWTFGQGTKVEIKGKPGSGKPGSGKPGSGKPGSQVQLVQSGAEVKKPGASVKVSCKASGYTFTGYYMHWVRQAPGQGLEWMGWINPHSGETNYAQKFQGRVTMTRDTSISTAYMELSRLRSDDTAVYYCARTYYYDTSGYYHDAFDVWGQGTMVTVSSGS

SEQ ID NO: 545 - protein, 125 aa, Artificial Sequence
  Description of Artificial Sequence: Synthetic polypeptide
  XENP024691 [anti-ICOS]_L0.45_H0.35 _scFv Variable heavy (vh) domain
QVQLVQSGAEVKKPGASVKVSCKASGYTFTGYYMHWVRQAPGQGLEWMGWINPHSGGTNYAQKFQGRVTMTRDTSISTAYMELSRLRSDDTAVYYCARTYYYDTSGYYHDAFDVWGQGTMVTVSS

SEQ ID NO: 546 - protein, 5 aa, Artificial Sequence
  Description of Artificial Sequence: Synthetic peptide
  XENP024691 [anti-ICOS]_L0.45_H0.35_scFv vhCDR1
GYYMH

SEQ ID NO: 547 - protein, 17 aa, Artificial Sequence
  Description of Artificial Sequence: Synthetic peptide
  XENP024691 [anti-ICOS]_L0.45_H0.35_scFv vhCDR2
WINPHSGGTNYAQKFQG

SEQ ID NO: 548 - protein, 16 aa, Artificial Sequence
  Description of Artificial Sequence: Synthetic peptide
  XENP024691 [anti-ICOS]_L0.45_H0.35_scFv vhCDR3
TYYYDTSGYYHDAFDV

SEQ ID NO: 549 - protein, 20 aa, Artificial Sequence
  Description of Artificial Sequence: Synthetic peptide
  XENP024691 [anti-ICOS]_L0.45_H0.35_scFv scFv linker
GKPGSGKPGSGKPGSGKPGS

SEQ ID NO: 550 - protein, 107 aa, Artificial Sequence; identical to SEQ ID NO: 490
  Description of Artificial Sequence: Synthetic polypeptide
  XENP024691 [anti-ICOS]_L0.45_H0.35 _scFv Variable light (vl) domain

SEQ ID NO: 551 - protein, 11 aa, Artificial Sequence
  Description of Artificial Sequence: Synthetic peptide
  XENP024691 [anti-ICOS]_L0.45_H0.35_scFv vlCDR1
RASQDISRLLA

SEQ ID NO: 552 - protein, 7 aa, Artificial Sequence
  Description of Artificial Sequence: Synthetic peptide
  XENP024691 [anti-ICOS]_L0.45_H0.35_scFv vlCDR2
AASSLQS

SEQ ID NO: 553 - protein, 9 aa, Artificial Sequence
  Description of Artificial Sequence: Synthetic peptide
  XENP024691 [anti-ICOS]_L0.45_H0.35_scFv vlCDR3
QQAQSFPWT

SEQ ID NO: 554 - protein, 254 aa, Artificial Sequence
  Description of Artificial Sequence: Synthetic polypeptide
  XENP024691 [anti-ICOS]_L0.45_H0.35_scFv scFv
DIQMTQSPSSVSASVGDRVTITCRASQDISRLLAWYQQKPGKAPKLLIYAASSLQSGVPSRFSGSGSGTDFTLTISSLQPEDFATYYCQQAQSFPWTFGQGTKVEIKGKPGSGKPGSGKPGSGKPGSQVQLVQSGAEVKKPGASVKVSCKASGYTFTGYYMHWVRQAPGQGLEWMGWINPHSGGTNYAQKFQGRVTMTRDTSISTAYMELSRLRSDDTAVYYCARTYYYDTSGYYHDAFDVWGQGTMVTVSSGS

SEQ ID NO: 555 - protein, 125 aa, Artificial Sequence
  Description of Artificial Sequence: Synthetic polypeptide
  XENP024692 [anti-ICOS]_L0.45_H0.34 _scFv Variable heavy (vh) domain
QVQLVQSGAEVKKPGASVKVSCKASGYTFTGYYMHWVRQAPGQGLEWMGWINPHSGGTNYAQKFQGRVTMTRDTSISTAYMELSRLRSDDTAVYYCARTYYYDSSGYYHDAFDVWGQGTMVTVSS

SEQ ID NO: 556 - protein, 5 aa, Artificial Sequence
  Description of Artificial Sequence: Synthetic peptide
  XENP024692 [anti-ICOS]_L0.45_H0.34_scFv vhCDR1
GYYMH

SEQ ID NO: 557 - protein, 17 aa, Artificial Sequence
  Description of Artificial Sequence: Synthetic peptide
  XENP024692 [anti-ICOS]_L0.45_H0.34_scFv vhCDR2
WINPHSGGTNYAQKFQG

SEQ ID NO: 558 - protein, 16 aa, Artificial Sequence
  Description of Artificial Sequence: Synthetic peptide
  XENP024692 [anti-ICOS]_L0.45_H0.34_scFv vhCDR3
TYYYDSSGYYHDAFDV

SEQ ID NO: 559 - protein, 20 aa, Artificial Sequence
  Description of Artificial Sequence: Synthetic peptide
  XENP024692 [anti-ICOS]_L0.45_H0.34_scFv scFv linker
GKPGSGKPGSGKPGSGKPGS

SEQ ID NO: 560 - protein, 107 aa, Artificial Sequence; identical to SEQ ID NO: 490
  Description of Artificial Sequence: Synthetic polypeptide
  XENP024692 [anti-ICOS]_L0.45_H0.34 _scFv Variable light (vl) domain

SEQ ID NO: 561 - protein, 11 aa, Artificial Sequence
  Description of Artificial Sequence: Synthetic peptide
  XENP024692 [anti-ICOS]_L0.45_H0.34_scFv vlCDR1
RASQDISRLLA

SEQ ID NO: 562 - protein, 7 aa, Artificial Sequence
  Description of Artificial Sequence: Synthetic peptide
  XENP024692 [anti-ICOS]_L0.45_H0.34_scFv vlCDR2
AASSLQS

SEQ ID NO: 563 - protein, 9 aa, Artificial Sequence
  Description of Artificial Sequence: Synthetic peptide
  XENP024692 [anti-ICOS]_L0.45_H0.34_scFv vlCDR3
QQAQSFPWT

SEQ ID NO: 564 - protein, 254 aa, Artificial Sequence
  Description of Artificial Sequence: Synthetic polypeptide
  XENP024692 [anti-ICOS]_L0.45_H0.34_scFv scFv
DIQMTQSPSSVSASVGDRVTITCRASQDISRLLAWYQQKPGKAPKLLIYAASSLQSGVPSRFSGSGSGTDFTLTISSLQPEDFATYYCQQAQSFPWTFGQGTKVEIKGKPGSGKPGSGKPGSGKPGSQVQLVQSGAEVKKPGASVKVSCKASGYTFTGYYMHWVRQAPGQGLEWMGWINPHSGGTNYAQKFQGRVTMTRDTSISTAYMELSRLRSDDTAVYYCARTYYYDSSGYYHDAFDVWGQGTMVTVSSGS

SEQ ID NO: 565 - protein, 125 aa, Artificial Sequence; identical to SEQ ID NO: 475
  Description of Artificial Sequence: Synthetic polypeptide
  XENP024693 [anti-ICOS]_L0.46_H0.40 _scFv Variable heavy (vh) domain

SEQ ID NO: 566 - protein, 5 aa, Artificial Sequence
  Description of Artificial Sequence: Synthetic peptide
  XENP024693 [anti-ICOS]_L0.46_H0.40_scFv vhCDR1
GYYMH

SEQ ID NO: 567 - protein, 17 aa, Artificial Sequence
  Description of Artificial Sequence: Synthetic peptide
  XENP024693 [anti-ICOS]_L0.46_H0.40_scFv vhCDR2
WINPHSGETNYAQKFQG

SEQ ID NO: 568 - protein, 16 aa, Artificial Sequence
  Description of Artificial Sequence: Synthetic peptide
  XENP024693 [anti-ICOS]_L0.46_H0.40_scFv vhCDR3
TYYYDTSGYYHDAFDV

SEQ ID NO: 569 - protein, 20 aa, Artificial Sequence
  Description of Artificial Sequence: Synthetic peptide
  XENP024693 [anti-ICOS]_L0.46_H0.40_scFv scFv linker
GKPGSGKPGSGKPGSGKPGS

SEQ ID NO: 570 - protein, 107 aa, Artificial Sequence
  Description of Artificial Sequence: Synthetic polypeptide
  XENP024693 [anti-ICOS]_L0.46_H0.40 _scFv Variable light (vl) domain
DIQMTQSPSSVSASVGDRVTITCRASQSISRLLAWYQQKPGKAPKLLIYAASSLQSGVPSRFSGSGSGTDFTLTISSLQPEDFATYYCQQAQSFPWTFGQGTKVEIK

SEQ ID NO: 571 - protein, 11 aa, Artificial Sequence
  Description of Artificial Sequence: Synthetic peptide
  XENP024693 [anti-ICOS]_L0.46_H0.40_scFv vlCDR1
RASQSISRLLA

SEQ ID NO: 572 - protein, 7 aa, Artificial Sequence
  Description of Artificial Sequence: Synthetic peptide
  XENP024693 [anti-ICOS]_L0.46_H0.40_scFv vlCDR2
AASSLQS

SEQ ID NO: 573 - protein, 9 aa, Artificial Sequence
  Description of Artificial Sequence: Synthetic peptide
  XENP024693 [anti-ICOS]_L0.46_H0.40_scFv vlCDR3
QQAQSFPWT

SEQ ID NO: 574 - protein, 254 aa, Artificial Sequence
  Description of Artificial Sequence: Synthetic polypeptide
  XENP024693 [anti-ICOS]_L0.46_H0.40_scFv scFv
DIQMTQSPSSVSASVGDRVTITCRASQSISRLLAWYQQKPGKAPKLLIYAASSLQSGVPSRFSGSGSGTDFTLTISSLQPEDFATYYCQQAQSFPWTFGQGTKVEIKGKPGSGKPGSGKPGSGKPGSQVQLVQSGAEVKKPGASVKVSCKASGYTFTGYYMHWVRQAPGQGLEWMGWINPHSGETNYAQKFQGRVTMTRDTSISTAYMELSSLRSEDTAVYYCARTYYYDTSGYYHDAFDVWGQGTMVTVSSGS

SEQ ID NO: 575 - protein, 125 aa, Artificial Sequence; identical to SEQ ID NO: 475
  Description of Artificial Sequence: Synthetic polypeptide
  XENP024694 [anti-ICOS]_L0.47_H0.40 _scFv Variable heavy (vh) domain

SEQ ID NO: 576 - protein, 5 aa, Artificial Sequence
  Description of Artificial Sequence: Synthetic peptide
  XENP024694 [anti-ICOS]_L0.47_H0.40_scFv vhCDR1
GYYMH

SEQ ID NO: 577 - protein, 17 aa, Artificial Sequence
  Description of Artificial Sequence: Synthetic peptide
  XENP024694 [anti-ICOS]_L0.47_H0.40_scFv vhCDR2
WINPHSGETNYAQKFQG

SEQ ID NO: 578 - protein, 16 aa, Artificial Sequence
  Description of Artificial Sequence: Synthetic peptide
  XENP024694 [anti-ICOS]_L0.47_H0.40_scFv vhCDR3
TYYYDTSGYYHDAFDV

SEQ ID NO: 579 - protein, 20 aa, Artificial Sequence
  Description of Artificial Sequence: Synthetic peptide
  XENP024694 [anti-ICOS]_L0.47_H0.40_scFv scFv linker
GKPGSGKPGSGKPGSGKPGS

SEQ ID NO: 580 - protein, 107 aa, Artificial Sequence
  Description of Artificial Sequence: Synthetic polypeptide
  XENP024694 [anti-ICOS]_L0.47_H0.40 _scFv Variable light (vl) domain
DIQMTQSPSSVSASVGDRVTITCRASQDISRLLAWYQQKPGKAPKLLIYSASSLQSGVPSRFSGSGSGTDFTLTISSLQPEDFATYYCQQAQSFPWTFGQGTKVEIK

SEQ ID NO: 581 - protein, 11 aa, Artificial Sequence
  Description of Artificial Sequence: Synthetic peptide
  XENP024694 [anti-ICOS]_L0.47_H0.40_scFv vlCDR1
RASQDISRLLA

SEQ ID NO: 582 - protein, 7 aa, Artificial Sequence
  Description of Artificial Sequence: Synthetic peptide
  XENP024694 [anti-ICOS]_L0.47_H0.40_scFv vlCDR2
SASSLQS

SEQ ID NO: 583 - protein, 9 aa, Artificial Sequence
  Description of Artificial Sequence: Synthetic peptide
  XENP024694 [anti-ICOS]_L0.47_H0.40_scFv vlCDR3
QQAQSFPWT

SEQ ID NO: 584 - protein, 254 aa, Artificial Sequence
  Description of Artificial Sequence: Synthetic polypeptide
  XENP024694 [anti-ICOS]_L0.47_H0.40_scFv scFv
DIQMTQSPSSVSASVGDRVTITCRASQDISRLLAWYQQKPGKAPKLLIYSASSLQSGVPSRFSGSGSGTDFTLTISSLQPEDFATYYCQQAQSFPWTFGQGTKVEIKGKPGSGKPGSGKPGSGKPGSQVQLVQSGAEVKKPGASVKVSCKASGYTFTGYYMHWVRQAPGQGLEWMGWINPHSGETNYAQKFQGRVTMTRDTSISTAYMELSSLRSEDTAVYYCARTYYYDTSGYYHDAFDVWGQGTMVTVSSGS

SEQ ID NO: 585 - protein, 230 aa, Artificial Sequence; identical to SEQ ID NO: 389
  Description of Artificial Sequence: Synthetic polypeptide
  XENP022050 [ICOS]_H0L0 _Fab_His Heavy Chain

SEQ ID NO: 586 - protein, 214 aa, Artificial Sequence; identical to SEQ ID NO: 146
  Description of Artificial Sequence: Synthetic polypeptide
  XENP022050 [ICOS]_H0L0 _Fab_His Light Chain

SEQ ID NO: 587 - protein, 230 aa, Artificial Sequence
  Description of Artificial Sequence: Synthetic polypeptide
  XENP022051 [ICOS]_H0.1_L0_Fab_His Heavy Chain
QVQLVQSGAEVKKPGASVKVSCKASGYTFTEYYMHWVRQAPGQGLEWMGWINPHSGGTNYAQKFQGRVTMTRDTSISTAYMELSRLRSDDTAVYYCARTYYYDSSGYYHDAFDIWGQGTMVTVSSASTKGPSVFPLAPSSKSTSGGTAALGCLVKDYFPEPVTVSWNSGALTSGVHTFPAVLQSSGLYSLSSVVTVPSSSLGTQTYICNVNHKPSNTKVDKKVEPKSCGS

SEQ ID NO: 588 - protein, 214 aa, Artificial Sequence; identical to SEQ ID NO: 146
  Description of Artificial Sequence: Synthetic polypeptide
  XENP022051 [ICOS]_H0.1_L0_Fab_His Light Chain

SEQ ID NO: 589 - protein, 230 aa, Artificial Sequence
  Description of Artificial Sequence: Synthetic polypeptide
  XENP022052 [ICOS]_H0.2_L0_Fab_His Heavy Chain
QVQLVQSGAEVKKPGASVKVSCKASGYTFTSYYMHWVRQAPGQGLEWMGWINPHSGGTNYAQKFQGRVTMTRDTSISTAYMELSRLRSDDTAVYYCARTYYYDSSGYYHDAFDIWGQGTMVTVSSASTKGPSVFPLAPSSKSTSGGTAALGCLVKDYFPEPVTVSWNSGALTSGVHTFPAVLQSSGLYSLSSVVTVPSSSLGTQTYICNVNHKPSNTKVDKKVEPKSCGS

SEQ ID NO: 590 - protein, 214 aa, Artificial Sequence; identical to SEQ ID NO: 146
  Description of Artificial Sequence: Synthetic polypeptide
  XENP022052 [ICOS]_H0.2_L0_Fab_His Light Chain

SEQ ID NO: 591 - protein, 230 aa, Artificial Sequence
  Description of Artificial Sequence: Synthetic polypeptide
  XENP022053 [ICOS]_H0.3_L0_Fab_His Heavy Chain
QVQLVQSGAEVKKPGASVKVSCKASGYTFTGYYMHWVRQAPGQGLEWMGIINPHSGGTNYAQKFQGRVTMTRDTSISTAYMELSRLRSDDTAVYYCARTYYYDSSGYYHDAFDIWGQGTMVTVSSASTKGPSVFPLAPSSKSTSGGTAALGCLVKDYFPEPVTVSWNSGALTSGVHTFPAVLQSSGLYSLSSVVTVPSSSLGTQTYICNVNHKPSNTKVDKKVEPKSCGS

SEQ ID NO: 592 - protein, 214 aa, Artificial Sequence; identical to SEQ ID NO: 146
  Description of Artificial Sequence: Synthetic polypeptide
  XENP022053 [ICOS]_H0.3_L0_Fab_His Light Chain

SEQ ID NO: 593 - protein, 230 aa, Artificial Sequence
  Description of Artificial Sequence: Synthetic polypeptide
  XENP022054 [ICOS]_H0.4_L0_Fab_His Heavy Chain
QVQLVQSGAEVKKPGASVKVSCKASGYTFTGYYMHWVRQAPGQGLEWMGWINPESGGTNYAQKFQGRVTMTRDTSISTAYMELSRLRSDDTAVYYCARTYYYDSSGYYHDAFDIWGQGTMVTVSSASTKGPSVFPLAPSSKSTSGGTAALGCLVKDYFPEPVTVSWNSGALTSGVHTFPAVLQSSGLYSLSSVVTVPSSSLGTQTYICNVNHKPSNTKVDKKVEPKSCGS

SEQ ID NO: 594 - protein, 214 aa, Artificial Sequence; identical to SEQ ID NO: 146
  Description of Artificial Sequence: Synthetic polypeptide
  XENP022054 [ICOS]_H0.4_L0_Fab_His Light Chain

SEQ ID NO: 595 - protein, 230 aa, Artificial Sequence
  Description of Artificial Sequence: Synthetic polypeptide
  XENP022055 [ICOS]_H0.5_L0_Fab_His Heavy Chain
QVQLVQSGAEVKKPGASVKVSCKASGYTFTGYYMHWVRQAPGQGLEWMGWINPSSGGTNYAQKFQGRVTMTRDTSISTAYMELSRLRSDDTAVYYCARTYYYDSSGYYHDAFDIWGQGTMVTVSSASTKGPSVFPLAPSSKSTSGGTAALGCLVKDYFPEPVTVSWNSGALTSGVHTFPAVLQSSGLYSLSSVVTVPSSSLGTQTYICNVNHKPSNTKVDKKVEPKSCGS

SEQ ID NO: 596 - protein, 214 aa, Artificial Sequence; identical to SEQ ID NO: 146
  Description of Artificial Sequence: Synthetic polypeptide
  XENP022055 [ICOS]_H0.5_L0_Fab_His Light Chain

SEQ ID NO: 597 - protein, 230 aa, Artificial Sequence
  Description of Artificial Sequence: Synthetic polypeptide
  XENP022056 [ICOS]_H0.6_L0_Fab_His Heavy Chain
QVQLVQSGAEVKKPGASVKVSCKASGYTFTGYYMHWVRQAPGQGLEWMGWINPHGGGTNYAQKFQGRVTMTRDTSISTAYMELSRLRSDDTAVYYCARTYYYDSSGYYHDAFDIWGQGTMVTVSSASTKGPSVFPLAPSSKSTSGGTAALGCLVKDYFPEPVTVSWNSGALTSGVHTFPAVLQSSGLYSLSSVVTVPSSSLGTQTYICNVNHKPSNTKVDKKVEPKSCGS

SEQ ID NO: 598 - protein, 214 aa, Artificial Sequence; identical to SEQ ID NO: 146
  Description of Artificial Sequence: Synthetic polypeptide
  XENP022056 [ICOS]_H0.6_L0_Fab_His Light Chain

SEQ ID NO: 599 - protein, 230 aa, Artificial Sequence
  Description of Artificial Sequence: Synthetic polypeptide
  XENP022057 [ICOS]_H0.7_L0_Fab_His Heavy Chain
QVQLVQSGAEVKKPGASVKVSCKASGYTFTGYYMHWVRQAPGQGLEWMGWINPHSGETNYAQKFQGRVTMTRDTSISTAYMELSRLRSDDTAVYYCARTYYYDSSGYYHDAFDIWGQGTMVTVSSASTKGPSVFPLAPSSKSTSGGTAALGCLVKDYFPEPVTVSWNSGALTSGVHTFPAVLQSSGLYSLSSVVTVPSSSLGTQTYICNVNHKPSNTKVDKKVEPKSCGS

SEQ ID NO: 600 - protein, 214 aa, Artificial Sequence; identical to SEQ ID NO: 146
  Description of Artificial Sequence: Synthetic polypeptide
  XENP022057 [ICOS]_H0.7_L0_Fab_His Light Chain

SEQ ID NO: 601 - protein, 230 aa, Artificial Sequence
  Description of Artificial Sequence: Synthetic polypeptide
  XENP022058 [ICOS]_H0.8_L0_Fab_His Heavy Chain
QVQLVQSGAEVKKPGASVKVSCKASGYTFTGYYMHWVRQAPGQGLEWMGWINPHSGGTSYAQKFQGRVTMTRDTSISTAYMELSRLRSDDTAVYYCARTYYYDSSGYYHDAFDIWGQGTMVTVSSASTKGPSVFPLAPSSKSTSGGTAALGCLVKDYFPEPVTVSWNSGALTSGVHTFPAVLQSSGLYSLSSVVTVPSSSLGTQTYICNVNHKPSNTKVDKKVEPKSCGS

SEQ ID NO: 602 - protein, 214 aa, Artificial Sequence; identical to SEQ ID NO: 146
  Description of Artificial Sequence: Synthetic polypeptide
  XENP022058 [ICOS]_H0.8_L0_Fab_His Light Chain

SEQ ID NO: 603 - protein, 230 aa, Artificial Sequence
  Description of Artificial Sequence: Synthetic polypeptide
  XENP022059 [ICOS]_H0.9_L0_Fab_His Heavy Chain
QVQLVQSGAEVKKPGASVKVSCKASGYTFTGYYMHWVRQAPGQGLEWMGWINPHSGGTNYAEKFQGRVTMTRDTSISTAYMELSRLRSDDTAVYYCARTYYYDSSGYYHDAFDIWGQGTMVTVSSASTKGPSVFPLAPSSKSTSGGTAALGCLVKDYFPEPVTVSWNSGALTSGVHTFPAVLQSSGLYSLSSVVTVPSSSLGTQTYICNVNHKPSNTKVDKKVEPKSCGS

SEQ ID NO: 604 - protein, 214 aa, Artificial Sequence; identical to SEQ ID NO: 146
  Description of Artificial Sequence: Synthetic polypeptide
  XENP022059 [ICOS]_H0.9_L0_Fab_His Light Chain

SEQ ID NO: 605 - protein, 230 aa, Artificial Sequence
  Description of Artificial Sequence: Synthetic polypeptide
  XENP022060 [ICOS]_H0.10_L0_Fab_His Heavy Chain
QVQLVQSGAEVKKPGASVKVSCKASGYTFTGYYMHWVRQAPGQGLEWMGWINPHSGGTNYAQKFQERVTMTRDTSISTAYMELSRLRSDDTAVYYCARTYYYDSSGYYHDAFDIWGQGTMVTVSSASTKGPSVFPLAPSSKSTSGGTAALGCLVKDYFPEPVTVSWNSGALTSGVHTFPAVLQSSGLYSLSSVVTVPSSSLGTQTYICNVNHKPSNTKVDKKVEPKSCGS

SEQ ID NO: 606 - protein, 214 aa, Artificial Sequence; identical to SEQ ID NO: 146
  Description of Artificial Sequence: Synthetic polypeptide
  XENP022060 [ICOS]_H0.10_L0_Fab_His Light Chain

SEQ ID NO: 607 - protein, 230 aa, Artificial Sequence
  Description of Artificial Sequence: Synthetic polypeptide
  XENP022061 [ICOS]_H0.11_L0_Fab_His Heavy Chain
QVQLVQSGAEVKKPGASVKVSCKASGYTFTGYYMHWVRQAPGQGLEWMGWINPHSGGTNYAQKFQGRVTITRDTSISTAYMELSRLRSDDTAVYYCARTYYYDSSGYYHDAFDIWGQGTMVTVSSASTKGPSVFPLAPSSKSTSGGTAALGCLVKDYFPEPVTVSWNSGALTSGVHTFPAVLQSSGLYSLSSVVTVPSSSLGTQTYICNVNHKPSNTKVDKKVEPKSCGS

SEQ ID NO: 608 - protein, 214 aa, Artificial Sequence; identical to SEQ ID NO: 146
  Description of Artificial Sequence: Synthetic polypeptide
  XENP022061 [ICOS]_H0.11_L0_Fab_His Light Chain

SEQ ID NO: 609 - protein, 230 aa, Artificial Sequence
  Description of Artificial Sequence: Synthetic polypeptide
  XENP022062 [ICOS]_H0.12_L0_Fab_His Heavy Chain
QVQLVQSGAEVKKPGASVKVSCKASGYTFTGYYMHWVRQAPGQGLEWMGWINPHSGGTNYAQKFQGRVTMTADTSISTAYMELSRLRSDDTAVYYCARTYYYDSSGYYHDAFDIWGQGTMVTVSSASTKGPSVFPLAPSSKSTSGGTAALGCLVKDYFPEPVTVSWNSGALTSGVHTFPAVLQSSGLYSLSSVVTVPSSSLGTQTYICNVNHKPSNTKVDKKVEPKSCGS

SEQ ID NO: 610 - protein, 214 aa, Artificial Sequence; identical to SEQ ID NO: 146
  Description of Artificial Sequence: Synthetic polypeptide
  XENP022062 [ICOS]_H0.12_L0_Fab_His Light Chain

SEQ ID NO: 611 - protein, 230 aa, Artificial Sequence
  Description of Artificial Sequence: Synthetic polypeptide
  XENP022063 [ICOS]_H0.13_L0_Fab_His Heavy Chain
QVQLVQSGAEVKKPGASVKVSCKASGYTFTGYYMHWVRQAPGQGLEWMGWINPHSGGTNYAQKFQGRVTMTEDTSISTAYMELSRLRSDDTAVYYCARTYYYDSSGYYHDAFDIWGQGTMVTVSSASTKGPSVFPLAPSSKSTSGGTAALGCLVKDYFPEPVTVSWNSGALTSGVHTFPAVLQSSGLYSLSSVVTVPSSSLGTQTYICNVNHKPSNTKVDKKVEPKSCGS

SEQ ID NO: 612 - protein, 214 aa, Artificial Sequence; identical to SEQ ID NO: 146
  Description of Artificial Sequence: Synthetic polypeptide
  XENP022063 [ICOS]_H0.13_L0_Fab_His Light Chain

SEQ ID NO: 613 - protein, 230 aa, Artificial Sequence
  Description of Artificial Sequence: Synthetic polypeptide
  XENP022064 [ICOS]_H0.14_L0_Fab_His Heavy Chain
QVQLVQSGAEVKKPGASVKVSCKASGYTFTGYYMHWVRQAPGQGLEWMGWINPHSGGTNYAQKFQGRVTMTTDTSISTAYMELSRLRSDDTAVYYCARTYYYDSSGYYHDAFDIWGQGTMVTVSSASTKGPSVFPLAPSSKSTSGGTAALGCLVKDYFPEPVTVSWNSGALTSGVHTFPAVLQSSGLYSLSSVVTVPSSSLGTQTYICNVNHKPSNTKVDKKVEPKSCGS

SEQ ID NO: 614 - protein, 214 aa, Artificial Sequence; identical to SEQ ID NO: 146
  Description of Artificial Sequence: Synthetic polypeptide
  XENP022064 [ICOS]_H0.14_L0_Fab_His Light Chain

SEQ ID NO: 615 - protein, 230 aa, Artificial Sequence
  Description of Artificial Sequence: Synthetic polypeptide
  XENP022065 [ICOS]_H0.15_L0_Fab_His Heavy Chain
QVQLVQSGAEVKKPGASVKVSCKASGYTFTGYYMHWVRQAPGQGLEWMGWINPHSGGTNYAQKFQGRVTMTRDESISTAYMELSRLRSDDTAVYYCARTYYYDSSGYYHDAFDIWGQGTMVTVSSASTKGPSVFPLAPSSKSTSGGTAALGCLVKDYFPEPVTVSWNSGALTSGVHTFPAVLQSSGLYSLSSVVTVPSSSLGTQTYICNVNHKPSNTKVDKKVEPKSCGS

SEQ ID NO: 616 - protein, 214 aa, Artificial Sequence; identical to SEQ ID NO: 146
  Description of Artificial Sequence: Synthetic polypeptide
  XENP022065 [ICOS]_H0.15_L0_Fab_His Light Chain

SEQ ID NO: 617 - protein, 230 aa, Artificial Sequence
  Description of Artificial Sequence: Synthetic polypeptide
  XENP022066 [ICOS]_H0.16_L0_Fab_His Heavy Chain
QVQLVQSGAEVKKPGASVKVSCKASGYTFTGYYMHWVRQAPGQGLEWMGWINPHSGGTNYAQKFQGRVTMTRDTSTSTAYMELSRLRSDDTAVYYCARTYYYDSSGYYHDAFDIWGQGTMVTVSSASTKGPSVFPLAPSSKSTSGGTAALGCLVKDYFPEPVTVSWNSGALTSGVHTFPAVLQSSGLYSLSSVVTVPSSSLGTQTYICNVNHKPSNTKVDKKVEPKSCGS

SEQ ID NO: 618 - protein, 214 aa, Artificial Sequence; identical to SEQ ID NO: 146
  Description of Artificial Sequence: Synthetic polypeptide
  XENP022066 [ICOS]_H0.16_L0_Fab_His Light Chain

SEQ ID NO: 619 - protein, 230 aa, Artificial Sequence
  Description of Artificial Sequence: Synthetic polypeptide
  XENP022067 [ICOS]_H0.17_L0_Fab_His Heavy Chain
QVQLVQSGAEVKKPGASVKVSCKASGYTFTGYYMHWVRQAPGQGLEWMGWINPHSGGTNYAQKFQGRVTMTRDTSISTAYMELSSLRSDDTAVYYCARTYYYDSSGYYHDAFDIWGQGTMVTVSSASTKGPSVFPLAPSSKSTSGGTAALGCLVKDYFPEPVTVSWNSGALTSGVHTFPAVLQSSGLYSLSSVVTVPSSSLGTQTYICNVNHKPSNTKVDKKVEPKSCGS

SEQ ID NO: 620 - protein, 214 aa, Artificial Sequence; identical to SEQ ID NO: 146
  Description of Artificial Sequence: Synthetic polypeptide
  XENP022067 [ICOS]_H0.17_L0_Fab_His Light Chain

SEQ ID NO: 621 - protein, 230 aa, Artificial Sequence
  Description of Artificial Sequence: Synthetic polypeptide
  XENP022068 [ICOS]_H0.18_L0_Fab_His Heavy Chain
QVQLVQSGAEVKKPGASVKVSCKASGYTFTGYYMHWVRQAPGQGLEWMGWINPHSGGTNYAQKFQGRVTMTRDTSISTAYMELSRLRSEDTAVYYCARTYYYDSSGYYHDAFDIWGQGTMVTVSSASTKGPSVFPLAPSSKSTSGGTAALGCLVKDYFPEPVTVSWNSGALTSGVHTFPAVLQSSGLYSLSSVVTVPSSSLGTQTYICNVNHKPSNTKVDKKVEPKSCGS

SEQ ID NO: 622 - protein, 214 aa, Artificial Sequence; identical to SEQ ID NO: 146
  Description of Artificial Sequence: Synthetic polypeptide
  XENP022068 [ICOS]_H0.18_L0_Fab_His Light Chain

SEQ ID NO: 623 - protein, 230 aa, Artificial Sequence
  Description of Artificial Sequence: Synthetic polypeptide
  XENP022069 [ICOS]_H0.19_L0_Fab_His Heavy Chain
QVQLVQSGAEVKKPGASVKVSCKASGYTFTGYYMHWVRQAPGQGLEWMGWINPHSGGTNYAQKFQGRVTMTRDTSISTAYMELSRLRSDDTAVYYCARTYYYASSGYYHDAFDIWGQGTMVTVSSASTKGPSVFPLAPSSKSTSGGTAALGCLVKDYFPEPVTVSWNSGALTSGVHTFPAVLQSSGLYSLSSVVTVPSSSLGTQTYICNVNHKPSNTKVDKKVEPKSCGS

SEQ ID NO: 624 - protein, 214 aa, Artificial Sequence; identical to SEQ ID NO: 146
  Description of Artificial Sequence: Synthetic polypeptide
  XENP022069 [ICOS]_H0.19_L0_Fab_His Light Chain

SEQ ID NO: 625 - protein, 230 aa, Artificial Sequence
  Description of Artificial Sequence: Synthetic polypeptide
  XENP022070 [ICOS]_H0.20_L0_Fab_His Heavy Chain
QVQLVQSGAEVKKPGASVKVSCKASGYTFTGYYMHWVRQAPGQGLEWMGWINPHSGGTNYAQKFQGRVTMTRDTSISTAYMELSRLRSDDTAVYYCARTYYYESSGYYHDAFDIWGQGTMVTVSSASTKGPSVFPLAPSSKSTSGGTAALGCLVKDYFPEPVTVSWNSGALTSGVHTFPAVLQSSGLYSLSSVVTVPSSSLGTQTYICNVNHKPSNTKVDKKVEPKSCGS

SEQ ID NO: 626 - protein, 214 aa, Artificial Sequence; identical to SEQ ID NO: 146
  Description of Artificial Sequence: Synthetic polypeptide
  XENP022070 [ICOS]_H0.20_L0_Fab_His Light Chain

SEQ ID NO: 627 - protein, 230 aa, Artificial Sequence
  Description of Artificial Sequence: Synthetic polypeptide
  XENP022071 [ICOS]_H0.21_L0_Fab_His Heavy Chain
QVQLVQSGAEVKKPGASVKVSCKASGYTFTGYYMHWVRQAPGQGLEWMGWINPHSGGTNYAQKFQGRVTMTRDTSISTAYMELSRLRSDDTAVYYCARTYYYQSSGYYHDAFDIWGQGTMVTVSSASTKGPSVFPLAPSSKSTSGGTAALGCLVKDYFPEPVTVSWNSGALTSGVHTFPAVLQSSGLYSLSSVVTVPSSSLGTQTYICNVNHKPSNTKVDKKVEPKSCGS

SEQ ID NO: 628 - protein, 214 aa, Artificial Sequence; identical to SEQ ID NO: 146
  Description of Artificial Sequence: Synthetic polypeptide
  XENP022071 [ICOS]_H0.21_L0_Fab_His Light Chain

SEQ ID NO: 629 - protein, 230 aa, Artificial Sequence
  Description of Artificial Sequence: Synthetic polypeptide
  XENP022072 [ICOS]_H0.22_L0_Fab_His Heavy Chain
QVQLVQSGAEVKKPGASVKVSCKASGYTFTGYYMHWVRQAPGQGLEWMGWINPHSGGTNYAQKFQGRVTMTRDTSISTAYMELSRLRSDDTAVYYCARTYYYSSSGYYHDAFDIWGQGTMVTVSSASTKGPSVFPLAPSSKSTSGGTAALGCLVKDYFPEPVTVSWNSGALTSGVHTFPAVLQSSGLYSLSSVVTVPSSSLGTQTYICNVNHKPSNTKVDKKVEPKSCGS

SEQ ID NO: 630 - protein, 214 aa, Artificial Sequence; identical to SEQ ID NO: 146
  Description of Artificial Sequence: Synthetic polypeptide
  XENP022072 [ICOS]_H0.22_L0_Fab_His Light Chain

SEQ ID NO: 631 - protein, 230 aa, Artificial Sequence
  Description of Artificial Sequence: Synthetic polypeptide
  XENP022073 [ICOS]_H0.23_L0_Fab_His Heavy Chain
QVQLVQSGAEVKKPGASVKVSCKASGYTFTGYYMHWVRQAPGQGLEWMGWINPHSGGTNYAQKFQGRVTMTRDTSISTAYMELSRLRSDDTAVYYCARTYYYTSSGYYHDAFDIWGQGTMVTVSSASTKGPSVFPLAPSSKSTSGGTAALGCLVKDYFPEPVTVSWNSGALTSGVHTFPAVLQSSGLYSLSSVVTVPSSSLGTQTYICNVNHKPSNTKVDKKVEPKSCGS

SEQ ID NO: 632 - protein, 214 aa, Artificial Sequence; identical to SEQ ID NO: 146
  Description of Artificial Sequence: Synthetic polypeptide
  XENP022073 [ICOS]_H0.23_L0_Fab_His Light Chain

SEQ ID NO: 633 - protein, 230 aa, Artificial Sequence
  Description of Artificial Sequence: Synthetic polypeptide
  XENP022074 [ICOS]_H0.24_L0_Fab_His Heavy Chain
QVQLVQSGAEVKKPGASVKVSCKASGYTFTGYYMHWVRQAPGQGLEWMGWINPHSGGTNYAQKFQGRVTMTRDTSISTAYMELSRLRSDDTAVYYCARTYYYDTSGYYHDAFDIWGQGTMVTVSSASTKGPSVFPLAPSSKSTSGGTAALGCLVKDYFPEPVTVSWNSGALTSGVHTFPAVLQSSGLYSLSSVVTVPSSSLGTQTYICNVNHKPSNTKVDKKVEPKSCGS

SEQ ID NO: 634 - protein, 214 aa, Artificial Sequence; identical to SEQ ID NO: 146
  Description of Artificial Sequence: Synthetic polypeptide
  XENP022074 [ICOS]_H0.24_L0_Fab_His Light Chain

SEQ ID NO: 635 - protein, 230 aa, Artificial Sequence
  Description of Artificial Sequence: Synthetic polypeptide
  XENP022075 [ICOS]_H0.25_L0_Fab_His Heavy Chain
QVQLVQSGAEVKKPGASVKVSCKASGYTFTGYYMHWVRQAPGQGLEWMGWINPHSGGTNYAQKFQGRVTMTRDTSISTAYMELSRLRSDDTAVYYCARTYYYDSSGYYEDAFDIWGQGTMVTVSSASTKGPSVFPLAPSSKSTSGGTAALGCLVKDYFPEPVTVSWNSGALTSGVHTFPAVLQSSGLYSLSSVVTVPSSSLGTQTYICNVNHKPSNTKVDKKVEPKSCGS

SEQ ID NO: 636 - protein, 214 aa, Artificial Sequence; identical to SEQ ID NO: 146
  Description of Artificial Sequence: Synthetic polypeptide
  XENP022075 [ICOS]_H0.25_L0_Fab_His Light Chain

SEQ ID NO: 637 - protein, 230 aa, Artificial Sequence
  Description of Artificial Sequence: Synthetic polypeptide
  XENP022076 [ICOS]_H0.26_L0_Fab_His Heavy Chain
QVQLVQSGAEVKKPGASVKVSCKASGYTFTGYYMHWVRQAPGQGLEWMGWINPHSGGTNYAQKFQGRVTMTRDTSISTAYMELSRLRSDDTAVYYCARTYYYDSSGYYQDAFDIWGQGTMVTVSSASTKGPSVFPLAPSSKSTSGGTAALGCLVKDYFPEPVTVSWNSGALTSGVHTFPAVLQSSGLYSLSSVVTVPSSSLGTQTYICNVNHKPSNTKVDKKVEPKSCGS

SEQ ID NO: 638 - protein, 214 aa, Artificial Sequence; identical to SEQ ID NO: 146
  Description of Artificial Sequence: Synthetic polypeptide
  XENP022076 [ICOS]_H0.26_L0_Fab_His Light Chain

SEQ ID NO: 639 - protein, 230 aa, Artificial Sequence
  Description of Artificial Sequence: Synthetic polypeptide
  XENP022077 [ICOS]_H0.27_L0_Fab_His Heavy Chain
QVQLVQSGAEVKKPGASVKVSCKASGYTFTGYYMHWVRQAPGQGLEWMGWINPHSGGTNYAQKFQGRVTMTRDTSISTAYMELSRLRSDDTAVYYCARTYYYDSSGYYSDAFDIWGQGTMVTVSSASTKGPSVFPLAPSSKSTSGGTAALGCLVKDYFPEPVTVSWNSGALTSGVHTFPAVLQSSGLYSLSSVVTVPSSSLGTQTYICNVNHKPSNTKVDKKVEPKSCGS

SEQ ID NO: 640 - protein, 214 aa, Artificial Sequence; identical to SEQ ID NO: 146
  Description of Artificial Sequence: Synthetic polypeptide
  XENP022077 [ICOS]_H0.27_L0_Fab_His Light Chain

SEQ ID NO: 641 - protein, 230 aa, Artificial Sequence
  Description of Artificial Sequence: Synthetic polypeptide
  XENP022078 [ICOS]_H0.28_L0_Fab_His Heavy Chain
QVQLVQSGAEVKKPGASVKVSCKASGYTFTGYYMHWVRQAPGQGLEWMGWINPHSGGTNYAQKFQGRVTMTRDTSISTAYMELSRLRSDDTAVYYCARTYYYDSSGYYYDAFDIWGQGTMVTVSSASTKGPSVFPLAPSSKSTSGGTAALGCLVKDYFPEPVTVSWNSGALTSGVHTFPAVLQSSGLYSLSSVVTVPSSSLGTQTYICNVNHKPSNTKVDKKVEPKSCGS

SEQ ID NO: 642 - protein, 214 aa, Artificial Sequence; identical to SEQ ID NO: 146
  Description of Artificial Sequence: Synthetic polypeptide
  XENP022078 [ICOS]_H0.28_L0_Fab_His Light Chain

SEQ ID NO: 643 - protein, 230 aa, Artificial Sequence
  Description of Artificial Sequence: Synthetic polypeptide
  XENP022079 [ICOS]_H0.29_L0_Fab_His Heavy Chain
QVQLVQSGAEVKKPGASVKVSCKASGYTFTGYYMHWVRQAPGQGLEWMGWINPHSGGTNYAQKFQGRVTMTRDTSISTAYMELSRLRSDDTAVYYCARTYYYDSSGYYHAAFDIWGQGTMVTVSSASTKGPSVFPLAPSSKSTSGGTAALGCLVKDYFPEPVTVSWNSGALTSGVHTFPAVLQSSGLYSLSSVVTVPSSSLGTQTYICNVNHKPSNTKVDKKVEPKSCGS

SEQ ID NO: 644 - protein, 214 aa, Artificial Sequence; identical to SEQ ID NO: 146
  Description of Artificial Sequence: Synthetic polypeptide
  XENP022079 [ICOS]_H0.29_L0_Fab_His Light Chain

SEQ ID NO: 645 - protein, 230 aa, Artificial Sequence
  Description of Artificial Sequence: Synthetic polypeptide
  XENP022080 [ICOS]_H0.30_L0_Fab_His Heavy Chain
QVQLVQSGAEVKKPGASVKVSCKASGYTFTGYYMHWVRQAPGQGLEWMGWINPHSGGTNYAQKFQGRVTMTRDTSISTAYMELSRLRSDDTAVYYCARTYYYDSSGYYHEAFDIWGQGTMVTVSSASTKGPSVFPLAPSSKSTSGGTAALGCLVKDYFPEPVTVSWNSGALTSGVHTFPAVLQSSGLYSLSSVVTVPSSSLGTQTYICNVNHKPSNTKVDKKVEPKSCGS

SEQ ID NO: 646 - protein, 214 aa, Artificial Sequence; identical to SEQ ID NO: 146
  Description of Artificial Sequence: Synthetic polypeptide
  XENP022080 [ICOS]_H0.30_L0_Fab_His Light Chain

SEQ ID NO: 647 - protein, 230 aa, Artificial Sequence
  Description of Artificial Sequence: Synthetic polypeptide
  XENP022081 [ICOS]_H0.31_L0_Fab_His Heavy Chain
QVQLVQSGAEVKKPGASVKVSCKASGYTFTGYYMHWVRQAPGQGLEWMGWINPHSGGTNYAQKFQGRVTMTRDTSISTAYMELSRLRSDDTAVYYCARTYYYDSSGYYHQAFDIWGQGTMVTVSSASTKGPSVFPLAPSSKSTSGGTAALGCLVKDYFPEPVTVSWNSGALTSGVHTFPAVLQSSGLYSLSSVVTVPSSSLGTQTYICNVNHKPSNTKVDKKVEPKSCGS

SEQ ID NO: 648 - protein, 214 aa, Artificial Sequence; identical to SEQ ID NO: 146
  Description of Artificial Sequence: Synthetic polypeptide
  XENP022081 [ICOS]_H0.31_L0_Fab_His Light Chain

SEQ ID NO: 649 - protein, 230 aa, Artificial Sequence
  Description of Artificial Sequence: Synthetic polypeptide
  XENP022082 [ICOS]_H0.32_L0_Fab_His Heavy Chain
QVQLVQSGAEVKKPGASVKVSCKASGYTFTGYYMHWVRQAPGQGLEWMGWINPHSGGTNYAQKFQGRVTMTRDTSISTAYMELSRLRSDDTAVYYCARTYYYDSSGYYHSAFDIWGQGTMVTVSSASTKGPSVFPLAPSSKSTSGGTAALGCLVKDYFPEPVTVSWNSGALTSGVHTFPAVLQSSGLYSLSSVVTVPSSSLGTQTYICNVNHKPSNTKVDKKVEPKSCGS

SEQ ID NO: 650 - protein, 214 aa, Artificial Sequence; identical to SEQ ID NO: 146
  Description of Artificial Sequence: Synthetic polypeptide
  XENP022082 [ICOS]_H0.32_L0_Fab_His Light Chain

SEQ ID NO: 651 - protein, 230 aa, Artificial Sequence
  Description of Artificial Sequence: Synthetic polypeptide
  XENP022083 [ICOS]_H0.33_L0_Fab_His Heavy Chain
QVQLVQSGAEVKKPGASVKVSCKASGYTFTGYYMHWVRQAPGQGLEWMGWINPHSGGTNYAQKFQGRVTMTRDTSISTAYMELSRLRSDDTAVYYCARTYYYDSSGYYHTAFDIWGQGTMVTVSSASTKGPSVFPLAPSSKSTSGGTAALGCLVKDYFPEPVTVSWNSGALTSGVHTFPAVLQSSGLYSLSSVVTVPSSSLGTQTYICNVNHKPSNTKVDKKVEPKSCGS

SEQ ID NO: 652 - protein, 214 aa, Artificial Sequence; identical to SEQ ID NO: 146
  Description of Artificial Sequence: Synthetic polypeptide
  XENP022083 [ICOS]_H0.33_L0_Fab_His Light Chain

SEQ ID NO: 653 - protein, 230 aa, Artificial Sequence
  Description of Artificial Sequence: Synthetic polypeptide
  XENP022084 [ICOS]_H0.34_L0_Fab_His Heavy Chain
QVQLVQSGAEVKKPGASVKVSCKASGYTFTGYYMHWVRQAPGQGLEWMGWINPHSGGTNYAQKFQGRVTMTRDTSISTAYMELSRLRSDDTAVYYCARTYYYDSSGYYHDAFDVWGQGTMVTVSSASTKGPSVFPLAPSSKSTSGGTAALGCLVKDYFPEPVTVSWNSGALTSGVHTFPAVLQSSGLYSLSSVVTVPSSSLGTQTYICNVNHKPSNTKVDKKVEPKSCGS

SEQ ID NO: 654 - protein, 214 aa, Artificial Sequence; identical to SEQ ID NO: 146
  Description of Artificial Sequence: Synthetic polypeptide
  XENP022084 [ICOS]_H0.34_L0_Fab_His Light Chain

SEQ ID NO: 655 - protein, 230 aa, Artificial Sequence; identical to SEQ ID NO: 389
  Description of Artificial Sequence: Synthetic polypeptide
  XENP022085 [ICOS]_H0_L0.1_Fab_His Heavy Chain

SEQ ID NO: 656 - protein, 214 aa, Artificial Sequence
  Description of Artificial Sequence: Synthetic polypeptide
  XENP022085 [ICOS]_H0_L0.1_Fab_His Light Chain
DIQMTQSPSSLSASVGDRVTITCRASQGISRLLAWYQQKPGKAPKLLIYVASSLQSGVPSRFSGSGSGTDFTLTISSLQPEDFATYYCQQANSFPWTFGQGTKVEIKRTVAAPSVFIFPPSDEQLKSGTASVVCLLNNFYPREAKVQWKVDNALQSGNSQESVTEQDSKDSTYSLSSTLTLSKADYEKHKVYACEVTHQGLSSPVTKSFNRGEC

SEQ ID NO: 657 - protein, 230 aa, Artificial Sequence; identical to SEQ ID NO: 389
  Description of Artificial Sequence: Synthetic polypeptide
  XENP022086 [ICOS]_H0_L0.2_Fab_His Heavy Chain

SEQ ID NO: 658 - protein, 214 aa, Artificial Sequence
  Description of Artificial Sequence: Synthetic polypeptide
  XENP022086 [ICOS]_H0_L0.2_Fab_His Light Chain
DIQMTQSPSSVSASVGDRVTITCQASQGISRLLAWYQQKPGKAPKLLIYVASSLQSGVPSRFSGSGSGTDFTLTISSLQPEDFATYYCQQANSFPWTFGQGTKVEIKRTVAAPSVFIFPPSDEQLKSGTASVVCLLNNFYPREAKVQWKVDNALQSGNSQESVTEQDSKDSTYSLSSTLTLSKADYEKHKVYACEVTHQGLSSPVTKSFNRGEC

SEQ ID NO: 659 - protein, 230 aa, Artificial Sequence; identical to SEQ ID NO: 389
  Description of Artificial Sequence: Synthetic polypeptide
  XENP022087 [ICOS]_H0_L0.3_Fab_His Heavy Chain

SEQ ID NO: 660 - protein, 214 aa, Artificial Sequence
  Description of Artificial Sequence: Synthetic polypeptide
  XENP022087 [ICOS]_H0_L0.3_Fab_His Light Chain
DIQMTQSPSSVSASVGDRVTITCRASQDISRLLAWYQQKPGKAPKLLIYVASSLQSGVPSRFSGSGSGTDFTLTISSLQPEDFATYYCQQANSFPWTFGQGTKVEIKRTVAAPSVFIFPPSDEQLKSGTASVVCLLNNFYPREAKVQWKVDNALQSGNSQESVTEQDSKDSTYSLSSTLTLSKADYEKHKVYACEVTHQGLSSPVTKSFNRGEC

SEQ ID NO: 661 - protein, 230 aa, Artificial Sequence; identical to SEQ ID NO: 389
  Description of Artificial Sequence: Synthetic polypeptide
  XENP022088 [ICOS]_H0_L0.4_Fab_His Heavy Chain

SEQ ID NO: 662 - protein, 214 aa, Artificial Sequence
  Description of Artificial Sequence: Synthetic polypeptide
  XENP022088 [ICOS]_H0_L0.4_Fab_His Light Chain
DIQMTQSPSSVSASVGDRVTITCRASQSISRLLAWYQQKPGKAPKLLIYVASSLQSGVPSRFSGSGSGTDFTLTISSLQPEDFATYYCQQANSFPWTFGQGTKVEIKRTVAAPSVFIFPPSDEQLKSGTASVVCLLNNFYPREAKVQWKVDNALQSGNSQESVTEQDSKDSTYSLSSTLTLSKADYEKHKVYACEVTHQGLSSPVTKSFNRGEC

SEQ ID NO: 663 - protein, 230 aa, Artificial Sequence; identical to SEQ ID NO: 389
  Description of Artificial Sequence: Synthetic polypeptide
  XENP022089 [ICOS]_H0_L0.5_Fab_His Heavy Chain

SEQ ID NO: 664 - protein, 214 aa, Artificial Sequence
  Description of Artificial Sequence: Synthetic polypeptide
  XENP022089 [ICOS]_H0_L0.5_Fab_His Light Chain
DIQMTQSPSSVSASVGDRVTITCRASQGISSLLAWYQQKPGKAPKLLIYVASSLQSGVPSRFSGSGSGTDFTLTISSLQPEDFATYYCQQANSFPWTFGQGTKVEIKRTVAAPSVFIFPPSDEQLKSGTASVVCLLNNFYPREAKVQWKVDNALQSGNSQESVTEQDSKDSTYSLSSTLTLSKADYEKHKVYACEVTHQGLSSPVTKSFNRGEC

SEQ ID NO: 665 - protein, 230 aa, Artificial Sequence; identical to SEQ ID NO: 389
  Description of Artificial Sequence: Synthetic polypeptide
  XENP022090 [ICOS]_H0_L0.6_Fab_His Heavy Chain

SEQ ID NO: 666 - protein, 214 aa, Artificial Sequence
  Description of Artificial Sequence: Synthetic polypeptide
  XENP022090 [ICOS]_H0_L0.6_Fab_His Light Chain
DIQMTQSPSSVSASVGDRVTITCRASQGISSWLAWYQQKPGKAPKLLIYVASSLQSGVPSRFSGSGSGTDFTLTISSLQPEDFATYYCQQANSFPWTFGQGTKVEIKRTVAAPSVFIFPPSDEQLKSGTASVVCLLNNFYPREAKVQWKVDNALQSGNSQESVTEQDSKDSTYSLSSTLTLSKADYEKHKVYACEVTHQGLSSPVTKSFNRGEC

SEQ ID NO: 667 - protein, 230 aa, Artificial Sequence; identical to SEQ ID NO: 389
  Description of Artificial Sequence: Synthetic polypeptide
  XENP022091 [ICOS]_H0_L0.7_Fab_His Heavy Chain

SEQ ID NO: 668 - protein, 214 aa, Artificial Sequence; identical to SEQ ID NO: 394
  Description of Artificial Sequence: Synthetic polypeptide
  XENP022091 [ICOS]_H0_L0.7_Fab_His Light Chain

SEQ ID NO: 669 - protein, 230 aa, Artificial Sequence; identical to SEQ ID NO: 389
  Description of Artificial Sequence: Synthetic polypeptide
  XENP022092 [ICOS]_H0_L0.8_Fab_His Heavy Chain

SEQ ID NO: 670 - protein, 214 aa, Artificial Sequence
  Description of Artificial Sequence: Synthetic polypeptide
  XENP022092 [ICOS]_H0_L0.8_Fab_His Light Chain
DIQMTQSPSSVSASVGDRVTITCRASQGISRWLAWYQQKPGKAPKLLIYVASSLQSGVPSRFSGSGSGTDFTLTISSLQPEDFATYYCQQANSFPWTFGQGTKVEIKRTVAAPSVFIFPPSDEQLKSGTASVVCLLNNFYPREAKVQWKVDNALQSGNSQESVTEQDSKDSTYSLSSTLTLSKADYEKHKVYACEVTHQGLSSPVTKSFNRGEC

SEQ ID NO: 671 - protein, 230 aa, Artificial Sequence; identical to SEQ ID NO: 389
  Description of Artificial Sequence: Synthetic polypeptide
  XENP022093 [ICOS]_H0_L0.9_Fab_His Heavy Chain

SEQ ID NO: 672 - protein, 214 aa, Artificial Sequence
  Description of Artificial Sequence: Synthetic polypeptide
  XENP022093 [ICOS]_H0_L0.9_Fab_His Light Chain
DIQMTQSPSSVSASVGDRVTITCRASQGISRYLAWYQQKPGKAPKLLIYVASSLQSGVPSRFSGSGSGTDFTLTISSLQPEDFATYYCQQANSFPWTFGQGTKVEIKRTVAAPSVFIFPPSDEQLKSGTASVVCLLNNFYPREAKVQWKVDNALQSGNSQESVTEQDSKDSTYSLSSTLTLSKADYEKHKVYACEVTHQGLSSPVTKSFNRGEC

SEQ ID NO: 673 - protein, 230 aa, Artificial Sequence; identical to SEQ ID NO: 389
  Description of Artificial Sequence: Synthetic polypeptide
  XENP022094 [ICOS]_H0_L0.10_Fab_His Heavy Chain

SEQ ID NO: 674 - protein, 214 aa, Artificial Sequence
  Description of Artificial Sequence: Synthetic polypeptide
  XENP022094 [ICOS]_H0_L0.10_Fab_His Light Chain
DIQMTQSPSSVSASVGDRVTITCRASQGISRLLAWYQQKPGKAPKLLIYAASSLQSGVPSRFSGSGSGTDFTLTISSLQPEDFATYYCQQANSFPWTFGQGTKVEIKRTVAAPSVFIFPPSDEQLKSGTASVVCLLNNFYPREAKVQWKVDNALQSGNSQESVTEQDSKDSTYSLSSTLTLSKADYEKHKVYACEVTHQGLSSPVTKSFNRGEC

SEQ ID NO: 675 - protein, 230 aa, Artificial Sequence; identical to SEQ ID NO: 389
  Description of Artificial Sequence: Synthetic polypeptide
  XENP022095 [ICOS]_H0_L0.11_Fab_His Heavy Chain

SEQ ID NO: 676 - protein, 214 aa, Artificial Sequence
  Description of Artificial Sequence: Synthetic polypeptide
  XENP022095 [ICOS]_H0_L0.11_Fab_His Light Chain
DIQMTQSPSSVSASVGDRVTITCRASQGISRLLAWYQQKPGKAPKLLIYSASSLQSGVPSRFSGSGSGTDFTLTISSLQPEDFATYYCQQANSFPWTFGQGTKVEIKRTVAAPSVFIFPPSDEQLKSGTASVVCLLNNFYPREAKVQWKVDNALQSGNSQESVTEQDSKDSTYSLSSTLTLSKADYEKHKVYACEVTHQGLSSPVTKSFNRGEC

SEQ ID NO: 677 - protein, 230 aa, Artificial Sequence; identical to SEQ ID NO: 389
  Description of Artificial Sequence: Synthetic polypeptide
  XENP022096 [ICOS]_H0_L0.12_Fab_His Heavy Chain

SEQ ID NO: 678 - protein, 214 aa, Artificial Sequence
  Description of Artificial Sequence: Synthetic polypeptide
  XENP022096 [ICOS]_H0_L0.12_Fab_His Light Chain
DIQMTQSPSSVSASVGDRVTITCRASQGISRLLAWYQQKPGKAPKLLIYVASTLQSGVPSRFSGSGSGTDFTLTISSLQPEDFATYYCQQANSFPWTFGQGTKVEIKRTVAAPSVFIFPPSDEQLKSGTASVVCLLNNFYPREAKVQWKVDNALQSGNSQESVTEQDSKDSTYSLSSTLTLSKADYEKHKVYACEVTHQGLSSPVTKSFNRGEC

SEQ ID NO: 679 - protein, 230 aa, Artificial Sequence; identical to SEQ ID NO: 389
  Description of Artificial Sequence: Synthetic polypeptide
  XENP022101 [ICOS]_H0_L0.13_Fab_His Heavy Chain

SEQ ID NO: 680 - protein, 214 aa, Artificial Sequence
  Description of Artificial Sequence: Synthetic polypeptide
  XENP022101 [ICOS]_H0_L0.13_Fab_His Light Chain
DIQMTQSPSSVSASVGDRVTITCRASQGISRLLAWYQQKPGKAPKLLIYVASSLESGVPSRFSGSGSGTDFTLTISSLQPEDFATYYCQQANSFPWTFGQGTKVEIKRTVAAPSVFIFPPSDEQLKSGTASVVCLLNNFYPREAKVQWKVDNALQSGNSQESVTEQDSKDSTYSLSSTLTLSKADYEKHKVYACEVTHQGLSSPVTKSFNRGEC

SEQ ID NO: 681 - protein, 230 aa, Artificial Sequence; identical to SEQ ID NO: 389
  Description of Artificial Sequence: Synthetic polypeptide
  XENP022102 [ICOS]_H0_L0.14_Fab_His Heavy Chain

SEQ ID NO: 682 - protein, 214 aa, Artificial Sequence
  Description of Artificial Sequence: Synthetic polypeptide
  XENP022102 [ICOS]_H0_L0.14_Fab_His Light Chain
DIQMTQSPSSVSASVGDRVTITCRASQGISRLLAWYQQKPGKAPKLLIYVASSLQSGVPSRFSGSGSGTDFTLTISSLQPEDFATYYCQQSNSFPWTFGQGTKVEIKRTVAAPSVFIFPPSDEQLKSGTASVVCLLNNFYPREAKVQWKVDNALQSGNSQESVTEQDSKDSTYSLSSTLTLSKADYEKHKVYACEVTHQGLSSPVTKSFNRGEC

SEQ ID NO: 683 - protein, 230 aa, Artificial Sequence; identical to SEQ ID NO: 389
  Description of Artificial Sequence: Synthetic polypeptide
  XENP022103 [ICOS]_H0_L0.15_Fab_His Heavy Chain

SEQ ID NO: 684 - protein, 214 aa, Artificial Sequence
  Description of Artificial Sequence: Synthetic polypeptide
  XENP022103 [ICOS]_H0_L0.15_Fab_His Light Chain
DIQMTQSPSSVSASVGDRVTITCRASQGISRLLAWYQQKPGKAPKLLIYVASSLQSGVPSRFSGSGSGTDFTLTISSLQPEDFATYYCQQAESFPWTFGQGTKVEIKRTVAAPSVFIFPPSDEQLKSGTASVVCLLNNFYPREAKVQWKVDNALQSGNSQESVTEQDSKDSTYSLSSTLTLSKADYEKHKVYACEVTHQGLSSPVTKSFNRGEC

SEQ ID NO: 685 - protein, 230 aa, Artificial Sequence; identical to SEQ ID NO: 389
  Description of Artificial Sequence: Synthetic polypeptide
  XENP022104 [ICOS]_H0_L0.16_Fab_His Heavy Chain

SEQ ID NO: 686 - protein, 214 aa, Artificial Sequence
  Description of Artificial Sequence: Synthetic polypeptide
  XENP022104 [ICOS]_H0_L0.16_Fab_His Light Chain
DIQMTQSPSSVSASVGDRVTITCRASQGISRLLAWYQQKPGKAPKLLIYVASSLQSGVPSRFSGSGSGTDFTLTISSLQPEDFATYYCQQAQSFPWTFGQGTKVEIKRTVAAPSVFIFPPSDEQLKSGTASVVCLLNNFYPREAKVQWKVDNALQSGNSQESVTEQDSKDSTYSLSSTLTLSKADYEKHKVYACEVTHQGLSSPVTKSFNRGEC

SEQ ID NO: 687 - protein, 230 aa, Artificial Sequence; identical to SEQ ID NO: 389
  Description of Artificial Sequence: Synthetic polypeptide
  XENP022105 [ICOS]_H0_L0.17_Fab_His Heavy Chain

SEQ ID NO: 688 - protein, 214 aa, Artificial Sequence
  Description of Artificial Sequence: Synthetic polypeptide
  XENP022105 [ICOS]_H0_L0.17_Fab_His Light Chain
DIQMTQSPSSVSASVGDRVTITCRASQGISRLLAWYQQKPGKAPKLLIYVASSLQSGVPSRFSGSGSGTDFTLTISSLQPEDFATYYCQQAYSFPWTFGQGTKVEIKRTVAAPSVFIFPPSDEQLKSGTASVVCLLNNFYPREAKVQWKVDNALQSGNSQESVTEQDSKDSTYSLSSTLTLSKADYEKHKVYACEVTHQGLSSPVTKSFNRGEC

SEQ ID NO: 689 - protein, 230 aa, Artificial Sequence; identical to SEQ ID NO: 389
  Description of Artificial Sequence: Synthetic polypeptide
  XENP022106 [ICOS]_H0_L0.18_Fab_His Heavy Chain

SEQ ID NO: 690 - protein, 214 aa, Artificial Sequence
  Description of Artificial Sequence: Synthetic polypeptide
  XENP022106 [ICOS]_H0_L0.18_Fab_His Light Chain
DIQMTQSPSSVSASVGDRVTITCRASQGISRLLAWYQQKPGKAPKLLIYVASSLQSGVPSRFSGSGSGTDFTLTISSLQPEDFATYYCQQANTFPWTFGQGTKVEIKRTVAAPSVFIFPPSDEQLKSGTASVVCLLNNFYPREAKVQWKVDNALQSGNSQESVTEQDSKDSTYSLSSTLTLSKADYEKHKVYACEVTHQGLSSPVTKSFNRGEC

SEQ ID NO: 691 - protein, 230 aa, Artificial Sequence; identical to SEQ ID NO: 389
  Description of Artificial Sequence: Synthetic polypeptide
  XENP022107 [ICOS]_H0_L0.19_Fab_His Heavy Chain

SEQ ID NO: 692 - protein, 214 aa, Artificial Sequence
  Description of Artificial Sequence: Synthetic polypeptide
  XENP022107 [ICOS]_H0_L0.19_Fab_His Light Chain
DIQMTQSPSSVSASVGDRVTITCRASQGISRLLAWYQQKPGKAPKLLIYVASSLQSGVPSRFSGSGSGTDFTLTISSLQPEDFATYYCQQANSTPWTFGQGTKVEIKRTVAAPSVFIFPPSDEQLKSGTASVVCLLNNFYPREAKVQWKVDNALQSGNSQESVTEQDSKDSTYSLSSTLTLSKADYEKHKVYACEVTHQGLSSPVTKSFNRGEC

SEQ ID NO: 693 - protein, 230 aa, Artificial Sequence; identical to SEQ ID NO: 389
  Description of Artificial Sequence: Synthetic polypeptide
  XENP022108 [ICOS]_H0_L0.20_Fab_His Heavy Chain

SEQ ID NO: 694 - protein, 214 aa, Artificial Sequence
  Description of Artificial Sequence: Synthetic polypeptide
  XENP022108 [ICOS]_H0_L0.20_Fab_His Light Chain
DIQMTQSPSSVSASVGDRVTITCRASQGISRLLAWYQQKPGKAPKLLIYVASSLQSGVPSRFSGSGSGTDFTLTISSLQPEDFATYYCQQANSYPWTFGQGTKVEIKRTVAAPSVFIFPPSDEQLKSGTASVVCLLNNFYPREAKVQWKVDNALQSGNSQESVTEQDSKDSTYSLSSTLTLSKADYEKHKVYACEVTHQGLSSPVTKSFNRGEC

SEQ ID NO: 695 - protein, 230 aa, Artificial Sequence; identical to SEQ ID NO: 389
  Description of Artificial Sequence: Synthetic polypeptide
  XENP022767 [ICOS]_H0_L0.21_Fab_His Heavy Chain

SEQ ID NO: 696 - protein, 214 aa, Artificial Sequence
  Description of Artificial Sequence: Synthetic polypeptide
  XENP022767 [ICOS]_H0_L0.21_Fab_His Light Chain
DIQMTQSPSSVSASVGDRVTITCRASQDISSLLAWYQQKPGKAPKLLIYVASSLQSGVPSRFSGSGSGTDFTLTISSLQPEDFATYYCQQANSFPWTFGQGTKVEIKRTVAAPSVFIFPPSDEQLKSGTASVVCLLNNFYPREAKVQWKVDNALQSGNSQESVTEQDSKDSTYSLSSTLTLSKADYEKHKVYACEVTHQGLSSPVTKSFNRGEC

SEQ ID NO: 697 - protein, 230 aa, Artificial Sequence; identical to SEQ ID NO: 389
  Description of Artificial Sequence: Synthetic polypeptide
  XENP022768 [ICOS]_H0_L0.22_Fab_His Heavy Chain

SEQ ID NO: 698 - protein, 214 aa, Artificial Sequence
  Description of Artificial Sequence: Synthetic polypeptide
  XENP022768 [ICOS]_H0_L0.22_Fab_His Light Chain
DIQMTQSPSSVSASVGDRVTITCRASQDISRLLAWYQQKPGKAPKLLIYAASSLQSGVPSRFSGSGSGTDFTLTISSLQPEDFATYYCQQANSFPWTFGQGTKVEIKRTVAAPSVFIFPPSDEQLKSGTASVVCLLNNFYPREAKVQWKVDNALQSGNSQESVTEQDSKDSTYSLSSTLTLSKADYEKHKVYACEVTHQGLSSPVTKSFNRGEC

SEQ ID NO: 699 - protein, 230 aa, Artificial Sequence; identical to SEQ ID NO: 389
  Description of Artificial Sequence: Synthetic polypeptide
  XENP022769 [ICOS]_H0_L0.23_Fab_His Heavy Chain

SEQ ID NO: 700 - protein, 214 aa, Artificial Sequence
  Description of Artificial Sequence: Synthetic polypeptide
  XENP022769 [ICOS]_H0_L0.23_Fab_His Light Chain
DIQMTQSPSSVSASVGDRVTITCRASQDISRLLAWYQQKPGKAPKLLIYVASSLQSGVPSRFSGSGSGTDFTLTISSLQPEDFATYYCQQAESFPWTFGQGTKVEIKRTVAAPSVFIFPPSDEQLKSGTASVVCLLNNFYPREAKVQWKVDNALQSGNSQESVTEQDSKDSTYSLSSTLTLSKADYEKHKVYACEVTHQGLSSPVTKSFNRGEC

SEQ ID NO: 701 - protein, 230 aa, Artificial Sequence; identical to SEQ ID NO: 389
  Description of Artificial Sequence: Synthetic polypeptide
  XENP022770 [ICOS]_H0_L0.24_Fab_His Heavy Chain

SEQ ID NO: 702 - protein, 214 aa, Artificial Sequence
  Description of Artificial Sequence: Synthetic polypeptide
  XENP022770 [ICOS]_H0_L0.24_Fab_His Light Chain
DIQMTQSPSSVSASVGDRVTITCRASQGISSLLAWYQQKPGKAPKLLIYAASSLQSGVPSRFSGSGSGTDFTLTISSLQPEDFATYYCQQANSFPWTFGQGTKVEIKRTVAAPSVFIFPPSDEQLKSGTASVVCLLNNFYPREAKVQWKVDNALQSGNSQESVTEQDSKDSTYSLSSTLTLSKADYEKHKVYACEVTHQGLSSPVTKSFNRGEC

SEQ ID NO: 703 - protein, 230 aa, Artificial Sequence; identical to SEQ ID NO: 389
  Description of Artificial Sequence: Synthetic polypeptide
  XENP022771 [ICOS]_H0_L0.25_Fab_His Heavy Chain

SEQ ID NO: 704 - protein, 214 aa, Artificial Sequence
  Description of Artificial Sequence: Synthetic polypeptide
  XENP022771 [ICOS]_H0_L0.25_Fab_His Light Chain
DIQMTQSPSSVSASVGDRVTITCRASQGISSLLAWYQQKPGKAPKLLIYVASSLQSGVPSRFSGSGSGTDFTLTISSLQPEDFATYYCQQAESFPWTFGQGTKVEIKRTVAAPSVFIFPPSDEQLKSGTASVVCLLNNFYPREAKVQWKVDNALQSGNSQESVTEQDSKDSTYSLSSTLTLSKADYEKHKVYACEVTHQGLSSPVTKSFNRGEC

SEQ ID NO: 705 - protein, 230 aa, Artificial Sequence; identical to SEQ ID NO: 389
  Description of Artificial Sequence: Synthetic polypeptide
  XENP022772 [ICOS]_H0_L0.26_Fab_His Heavy Chain

SEQ ID NO: 706 - protein, 214 aa, Artificial Sequence
  Description of Artificial Sequence: Synthetic polypeptide
  XENP022772 [ICOS]_H0_L0.26_Fab_His Light Chain
DIQMTQSPSSVSASVGDRVTITCRASQGISRLLAWYQQKPGKAPKLLIYAASSLQSGVPSRFSGSGSGTDFTLTISSLQPEDFATYYCQQAESFPWTFGQGTKVEIKRTVAAPSVFIFPPSDEQLKSGTASVVCLLNNFYPREAKVQWKVDNALQSGNSQESVTEQDSKDSTYSLSSTLTLSKADYEKHKVYACEVTHQGLSSPVTKSFNRGEC

SEQ ID NO: 707 - protein, 230 aa, Artificial Sequence; identical to SEQ ID NO: 389
  Description of Artificial Sequence: Synthetic polypeptide
  XENP022773 [ICOS]_H0_L0.27_Fab_His Heavy Chain

SEQ ID NO: 708 - protein, 214 aa, Artificial Sequence
  Description of Artificial Sequence: Synthetic polypeptide
  XENP022773 [ICOS]_H0_L0.27_Fab_His Light Chain
DIQMTQSPSSVSASVGDRVTITCRASQDISSLLAWYQQKPGKAPKLLIYAASSLQSGVPSRFSGSGSGTDFTLTISSLQPEDFATYYCQQANSFPWTFGQGTKVEIKRTVAAPSVFIFPPSDEQLKSGTASVVCLLNNFYPREAKVQWKVDNALQSGNSQESVTEQDSKDSTYSLSSTLTLSKADYEKHKVYACEVTHQGLSSPVTKSFNRGEC

SEQ ID NO: 709 - protein, 230 aa, Artificial Sequence; identical to SEQ ID NO: 389
  Description of Artificial Sequence: Synthetic polypeptide
  XENP022774 [ICOS]_H0_L0.28_Fab_His Heavy Chain

SEQ ID NO: 710 - protein, 214 aa, Artificial Sequence
  Description of Artificial Sequence: Synthetic polypeptide
  XENP022774 [ICOS]_H0_L0.28_Fab_His Light Chain
DIQMTQSPSSVSASVGDRVTITCRASQDISSLLAWYQQKPGKAPKLLIYVASSLQSGVPSRFSGSGSGTDFTLTISSLQPEDFATYYCQQAESFPWTFGQGTKVEIKRTVAAPSVFIFPPSDEQLKSGTASVVCLLNNFYPREAKVQWKVDNALQSGNSQESVTEQDSKDSTYSLSSTLTLSKADYEKHKVYACEVTHQGLSSPVTKSFNRGEC

SEQ ID NO: 711 - protein, 230 aa, Artificial Sequence; identical to SEQ ID NO: 389
  Description of Artificial Sequence: Synthetic polypeptide
  XENP022775 [ICOS]_H0_L0.29_Fab_His Heavy Chain

SEQ ID NO: 712 - protein, 214 aa, Artificial Sequence
  Description of Artificial Sequence: Synthetic polypeptide
  XENP022775 [ICOS]_H0_L0.29_Fab_His Light Chain
DIQMTQSPSSVSASVGDRVTITCRASQDISRLLAWYQQKPGKAPKLLIYAASSLQSGVPSRFSGSGSGTDFTLTISSLQPEDFATYYCQQAESFPWTFGQGTKVEIKRTVAAPSVFIFPPSDEQLKSGTASVVCLLNNFYPREAKVQWKVDNALQSGNSQESVTEQDSKDSTYSLSSTLTLSKADYEKHKVYACEVTHQGLSSPVTKSFNRGEC

SEQ ID NO: 713 - protein, 230 aa, Artificial Sequence; identical to SEQ ID NO: 389
  Description of Artificial Sequence: Synthetic polypeptide
  XENP022776 [ICOS]_H0_L0.30_Fab_His Heavy Chain

SEQ ID NO: 714 - protein, 214 aa, Artificial Sequence
  Description of Artificial Sequence: Synthetic polypeptide
  XENP022776 [ICOS]_H0_L0.30_Fab_His Light Chain
DIQMTQSPSSVSASVGDRVTITCRASQGISSLLAWYQQKPGKAPKLLIYAASSLQSGVPSRFSGSGSGTDFTLTISSLQPEDFATYYCQQAESFPWTFGQGTKVEIKRTVAAPSVFIFPPSDEQLKSGTASVVCLLNNFYPREAKVQWKVDNALQSGNSQESVTEQDSKDSTYSLSSTLTLSKADYEKHKVYACEVTHQGLSSPVTKSFNRGEC

SEQ ID NO: 715 - protein, 230 aa, Artificial Sequence; identical to SEQ ID NO: 389
  Description of Artificial Sequence: Synthetic polypeptide
  XENP022777 [ICOS]_H0_L0.31_Fab_His Heavy Chain

SEQ ID NO: 716 - protein, 214 aa, Artificial Sequence
  Description of Artificial Sequence: Synthetic polypeptide
  XENP022777 [ICOS]_H0_L0.31_Fab_His Light Chain
DIQMTQSPSSVSASVGDRVTITCRASQDISSLLAWYQQKPGKAPKLLIYAASSLQSGVPSRFSGSGSGTDFTLTISSLQPEDFATYYCQQAESFPWTFGQGTKVEIKRTVAAPSVFIFPPSDEQLKSGTASVVCLLNNFYPREAKVQWKVDNALQSGNSQESVTEQDSKDSTYSLSSTLTLSKADYEKHKVYACEVTHQGLSSPVTKSFNRGEC

SEQ ID NO: 717 - protein, 230 aa, Artificial Sequence; identical to SEQ ID NO: 389
  Description of Artificial Sequence: Synthetic polypeptide
  XENP022778 [ICOS]_H0_L0.32_Fab_His Heavy Chain

SEQ ID NO: 718 - protein, 214 aa, Artificial Sequence
  Description of Artificial Sequence: Synthetic polypeptide
  XENP022778 [ICOS]_H0_L0.32_Fab_His Light Chain
DIQMTQSPSSVSASVGDRVTITCQASQDISSLLAWYQQKPGKAPKLLIYVASSLQSGVPSRFSGSGSGTDFTLTISSLQPEDFATYYCQQANSFPWTFGQGTKVEIKRTVAAPSVFIFPPSDEQLKSGTASVVCLLNNFYPREAKVQWKVDNALQSGNSQESVTEQDSKDSTYSLSSTLTLSKADYEKHKVYACEVTHQGLSSPVTKSFNRGEC

SEQ ID NO: 719 - protein, 230 aa, Artificial Sequence; identical to SEQ ID NO: 389
  Description of Artificial Sequence: Synthetic polypeptide
  XENP022779 [ICOS]_H0_L0.33_Fab_His Heavy Chain

SEQ ID NO: 720 - protein, 214 aa, Artificial Sequence
  Description of Artificial Sequence: Synthetic polypeptide
  XENP022779 [ICOS]_H0_L0.33_Fab_His Light Chain
DIQMTQSPSSVSASVGDRVTITCQASQDISRLLAWYQQKPGKAPKLLIYAASSLQSGVPSRFSGSGSGTDFTLTISSLQPEDFATYYCQQANSFPWTFGQGTKVEIKRTVAAPSVFIFPPSDEQLKSGTASVVCLLNNFYPREAKVQWKVDNALQSGNSQESVTEQDSKDSTYSLSSTLTLSKADYEKHKVYACEVTHQGLSSPVTKSFNRGEC

SEQ ID NO: 721 - protein, 230 aa, Artificial Sequence; identical to SEQ ID NO: 389
  Description of Artificial Sequence: Synthetic polypeptide
  XENP022780 [ICOS]_H0_L0.34_Fab_His Heavy Chain

SEQ ID NO: 722 - protein, 214 aa, Artificial Sequence; identical to SEQ ID NO: 404
  Description of Artificial Sequence: Synthetic polypeptide
  XENP022780 [ICOS]_H0_L0.34_Fab_His Light Chain

SEQ ID NO: 723 - protein, 230 aa, Artificial Sequence; identical to SEQ ID NO: 389
  Description of Artificial Sequence: Synthetic polypeptide
  XENP022781 [ICOS]_H0_L0.35_Fab_His Heavy Chain

SEQ ID NO: 724 - protein, 214 aa, Artificial Sequence
  Description of Artificial Sequence: Synthetic polypeptide
  XENP022781 [ICOS]_H0_L0.35_Fab_His Light Chain
DIQMTQSPSSVSASVGDRVTITCQASQDISSLLAWYQQKPGKAPKLLIYAASSLQSGVPSRFSGSGSGTDFTLTISSLQPEDFATYYCQQANSFPWTFGQGTKVEIKRTVAAPSVFIFPPSDEQLKSGTASVVCLLNNFYPREAKVQWKVDNALQSGNSQESVTEQDSKDSTYSLSSTLTLSKADYEKHKVYACEVTHQGLSSPVTKSFNRGEC

SEQ ID NO: 725 - protein, 230 aa, Artificial Sequence; identical to SEQ ID NO: 389
  Description of Artificial Sequence: Synthetic polypeptide
  XENP022782 [ICOS]_H0_L0.36_Fab_His Heavy Chain

SEQ ID NO: 726 - protein, 214 aa, Artificial Sequence; identical to SEQ ID NO: 414
  Description of Artificial Sequence: Synthetic polypeptide
  XENP022782 [ICOS]_H0_L0.36_Fab_His Light Chain

SEQ ID NO: 727 - protein, 230 aa, Artificial Sequence; identical to SEQ ID NO: 389
  Description of Artificial Sequence: Synthetic polypeptide
  XENP022783 [ICOS]_H0_L0.37_Fab_His Heavy Chain

SEQ ID NO: 728 - protein, 214 aa, Artificial Sequence; identical to SEQ ID NO: 424
  Description of Artificial Sequence: Synthetic polypeptide
  XENP022783 [ICOS]_H0_L0.37_Fab_His Light Chain

SEQ ID NO: 729 - protein, 230 aa, Artificial Sequence; identical to SEQ ID NO: 389
  Description of Artificial Sequence: Synthetic polypeptide
  XENP022784 [ICOS]_H0_L0.38_Fab_His Heavy Chain

SEQ ID NO: 730 - protein, 214 aa, Artificial Sequence; identical to SEQ ID NO: 434
  Description of Artificial Sequence: Synthetic polypeptide
  XENP022784 [ICOS]_H0_L0.38_Fab_His Light Chain

SEQ ID NO: 731 - protein, 230 aa, Artificial Sequence; identical to SEQ ID NO: 389
  Description of Artificial Sequence: Synthetic polypeptide
  XENP022860 [ICOS]_H0_L0.42_Fab_His Heavy Chain

SEQ ID NO: 732 - protein, 214 aa, Artificial Sequence
  Description of Artificial Sequence: Synthetic polypeptide
  XENP022860 [ICOS]_H0_L0.42_Fab_His Light Chain
DIQMTQSPSSVSASVGDRVTITCQASQDISSYLAWYQQKPGKAPKLLIYVASSLQSGVPSRFSGSGSGTDFTLTISSLQPEDFATYYCQQAESFPWTFGQGTKVEIKRTVAAPSVFIFPPSDEQLKSGTASVVCLLNNFYPREAKVQWKVDNALQSGNSQESVTEQDSKDSTYSLSSTLTLSKADYEKHKVYACEVTHQGLSSPVTKSFNRGEC

SEQ ID NO: 733 - protein, 230 aa, Artificial Sequence; identical to SEQ ID NO: 389
  Description of Artificial Sequence: Synthetic polypeptide
  XENP022861 [ICOS]_H0_L0.43_Fab_His Heavy Chain

SEQ ID NO: 734 - protein, 214 aa, Artificial Sequence
  Description of Artificial Sequence: Synthetic polypeptide
  XENP022861 [ICOS]_H0_L0.43_Fab_His Light Chain
DIQMTQSPSSVSASVGDRVTITCQASQDISSYLAWYQQKPGKAPKLLIYAASSLQSGVPSRFSGSGSGTDFTLTISSLQPEDFATYYCQQAESFPWTFGQGTKVEIKRTVAAPSVFIFPPSDEQLKSGTASVVCLLNNFYPREAKVQWKVDNALQSGNSQESVTEQDSKDSTYSLSSTLTLSKADYEKHKVYACEVTHQGLSSPVTKSFNRGEC

SEQ ID NO: 735 - protein, 230 aa, Artificial Sequence; identical to SEQ ID NO: 389
  Description of Artificial Sequence: Synthetic polypeptide
  XENP022862 [ICOS]_H0_L0.44_Fab_His Heavy Chain

SEQ ID NO: 736 - protein, 214 aa, Artificial Sequence
  Description of Artificial Sequence: Synthetic polypeptide
  XENP022862 [ICOS]_H0_L0.44_Fab_His Light Chain
DIQMTQSPSSVSASVGDRVTITCQASQDISSYLAWYQQKPGKAPKLLIYAASSLQSGVPSRFSGSGSGTDFTLTISSLQPEDFATYYCQQANSFPWTFGQGTKVEIKRTVAAPSVFIFPPSDEQLKSGTASVVCLLNNFYPREAKVQWKVDNALQSGNSQESVTEQDSKDSTYSLSSTLTLSKADYEKHKVYACEVTHQGLSSPVTKSFNRGEC

SEQ ID NO: 737 - protein, 230 aa, Artificial Sequence
  Description of Artificial Sequence: Synthetic polypeptide
  XENP022863 [ICOS]_H0.35_L0.38_Fab_His Heavy Chain
QVQLVQSGAEVKKPGASVKVSCKASGYTFTGYYMHWVRQAPGQGLEWMGWINPHSGGTNYAQKFQGRVTMTRDTSISTAYMELSRLRSDDTAVYYCARTYYYDTSGYYHDAFDVWGQGTMVTVSSASTKGPSVFPLAPSSKSTSGGTAALGCLVKDYFPEPVTVSWNSGALTSGVHTFPAVLQSSGLYSLSSVVTVPSSSLGTQTYICNVNHKPSNTKVDKKVEPKSCGS

SEQ ID NO: 738 - protein, 214 aa, Artificial Sequence; identical to SEQ ID NO: 434
  Description of Artificial Sequence: Synthetic polypeptide
  XENP022863 [ICOS]_H0.35_L0.38_Fab_His Light Chain

SEQ ID NO: 739 - protein, 230 aa, Artificial Sequence; identical to SEQ ID NO: 737
  Description of Artificial Sequence: Synthetic polypeptide
  XENP022864 [ICOS]_H0.35_L0.42_Fab_His Heavy Chain

SEQ ID NO: 740 - protein, 214 aa, Artificial Sequence; identical to SEQ ID NO: 732
  Description of Artificial Sequence: Synthetic polypeptide
  XENP022864 [ICOS]_H0.35_L0.42_Fab_His Light Chain

SEQ ID NO: 741 - protein, 230 aa, Artificial Sequence; identical to SEQ ID NO: 737
  Description of Artificial Sequence: Synthetic polypeptide
  XENP022865 [ICOS]_H0.35_L0.43_Fab_His Heavy Chain

SEQ ID NO: 742 - protein, 214 aa, Artificial Sequence; identical to SEQ ID NO: 734
  Description of Artificial Sequence: Synthetic polypeptide
  XENP022865 [ICOS]_H0.35_L0.43_Fab_His Light Chain

SEQ ID NO: 743 - protein, 230 aa, Artificial Sequence; identical to SEQ ID NO: 737
  Description of Artificial Sequence: Synthetic polypeptide
  XENP022866 [ICOS]_H0.35_L0.44_Fab_His Heavy Chain

SEQ ID NO: 744 - protein, 214 aa, Artificial Sequence; identical to SEQ ID NO: 736
  Description of Artificial Sequence: Synthetic polypeptide
  XENP022866 [ICOS]_H0.35_L0.44_Fab_His Light Chain

SEQ ID NO: 745 - protein, 230 aa, Artificial Sequence
  Description of Artificial Sequence: Synthetic polypeptide
  XENP022867 [ICOS]_H0.61_L0.38_Fab_His Heavy Chain
QVQLVQSGAEVKKPGASVKVSCKASGYTFTGYYMHWVRQAPGQGLEWMGIINPHSGGTNYAQKFQGRVTMTRDTSISTAYMELSRLRSDDTAVYYCARTYYYDTSGYYHDAFDVWGQGTMVTVSSASTKGPSVFPLAPSSKSTSGGTAALGCLVKDYFPEPVTVSWNSGALTSGVHTFPAVLQSSGLYSLSSVVTVPSSSLGTQTYICNVNHKPSNTKVDKKVEPKSCGS

SEQ ID NO: 746 - protein, 214 aa, Artificial Sequence; identical to SEQ ID NO: 434
  Description of Artificial Sequence: Synthetic polypeptide
  XENP022867 [ICOS]_H0.61_L0.38_Fab_His Light Chain

SEQ ID NO: 747 - protein, 230 aa, Artificial Sequence; identical to SEQ ID NO: 745
  Description of Artificial Sequence: Synthetic polypeptide
  XENP022868 [ICOS]_H0.61_L0.42_Fab_His Heavy Chain

SEQ ID NO: 748 - protein, 214 aa, Artificial Sequence; identical to SEQ ID NO: 732
  Description of Artificial Sequence: Synthetic polypeptide
  XENP022868 [ICOS]_H0.61_L0.42_Fab_His Light Chain

SEQ ID NO: 749 - protein, 230 aa, Artificial Sequence; identical to SEQ ID NO: 745
  Description of Artificial Sequence: Synthetic polypeptide
  XENP022869 [ICOS]_H0.61_L0.43_Fab_His Heavy Chain

SEQ ID NO: 750 - protein, 214 aa, Artificial Sequence; identical to SEQ ID NO: 734
  Description of Artificial Sequence: Synthetic polypeptide
  XENP022869 [ICOS]_H0.61_L0.43_Fab_His Light Chain

SEQ ID NO: 751 - protein, 230 aa, Artificial Sequence; identical to SEQ ID NO: 745
  Description of Artificial Sequence: Synthetic polypeptide
  XENP022870 [ICOS]_H0.61_L0.44_Fab_His Heavy Chain

SEQ ID NO: 752 - protein, 214 aa, Artificial Sequence; identical to SEQ ID NO: 736
  Description of Artificial Sequence: Synthetic polypeptide
  XENP022870 [ICOS]_H0.61_L0.44_Fab_His Light Chain

SEQ ID NO: 753 - protein, 230 aa, Artificial Sequence; identical to SEQ ID NO: 633
  Description of Artificial Sequence: Synthetic polypeptide
  XENP022871 [ICOS]_H0.24_L0.38_Fab_His Heavy Chain

SEQ ID NO: 754 - protein, 214 aa, Artificial Sequence; identical to SEQ ID NO: 434
  Description of Artificial Sequence: Synthetic polypeptide
  XENP022871 [ICOS]_H0.24_L0.38_Fab_His Light Chain

SEQ ID NO: 755 - protein, 230 aa, Artificial Sequence
  Description of Artificial Sequence: Synthetic polypeptide
  XENP022872 [ICOS]_H0.37_L0.38_Fab_His Heavy Chain
QVQLVQSGAEVKKPGASVKVSCKASGYTFTGYYMHWVRQAPGQGLEWMGWINPHSGGTNYAQKFQGRVTMTRDTSISTAYMELSSLRSEDTAVYYCARTYYYDTSGYYHDAFDVWGQGTMVTVSSASTKGPSVFPLAPSSKSTSGGTAALGCLVKDYFPEPVTVSWNSGALTSGVHTFPAVLQSSGLYSLSSVVTVPSSSLGTQTYICNVNHKPSNTKVDKKVEPKSCGS

SEQ ID NO: 756 - protein, 214 aa, Artificial Sequence; identical to SEQ ID NO: 434
  Description of Artificial Sequence: Synthetic polypeptide
  XENP022872 [ICOS]_H0.37_L0.38_Fab_His Light Chain

SEQ ID NO: 757 - protein, 230 aa, Artificial Sequence
  Description of Artificial Sequence: Synthetic polypeptide
  XENP022873 [ICOS]_H0.40_L0.38_Fab_His Heavy Chain
QVQLVQSGAEVKKPGASVKVSCKASGYTFTGYYMHWVRQAPGQGLEWMGWINPHSGETNYAQKFQGRVTMTRDTSISTAYMELSSLRSEDTAVYYCARTYYYDTSGYYHDAFDVWGQGTMVTVSSASTKGPSVFPLAPSSKSTSGGTAALGCLVKDYFPEPVTVSWNSGALTSGVHTFPAVLQSSGLYSLSSVVTVPSSSLGTQTYICNVNHKPSNTKVDKKVEPKSCGS

SEQ ID NO: 758 - protein, 214 aa, Artificial Sequence; identical to SEQ ID NO: 434
  Description of Artificial Sequence: Synthetic polypeptide
  XENP022873 [ICOS]_H0.40_L0.38_Fab_His Light Chain

SEQ ID NO: 759 - protein, 230 aa, Artificial Sequence
  Description of Artificial Sequence: Synthetic polypeptide
  XENP022874 [ICOS]_H0.44_L0.38_Fab_His Heavy Chain
QVQLVQSGAEVKKPGASVKVSCKASGYTFTGYYMHWVRQAPGQGLEWMGWINPHSGGTNYAQKFQGRVTITADESTSTAYMELSRLRSDDTAVYYCARTYYYDTSGYYHDAFDVWGQGTMVTVSSASTKGPSVFPLAPSSKSTSGGTAALGCLVKDYFPEPVTVSWNSGALTSGVHTFPAVLQSSGLYSLSSVVTVPSSSLGTQTYICNVNHKPSNTKVDKKVEPKSCGS

SEQ ID NO: 760 - protein, 214 aa, Artificial Sequence; identical to SEQ ID NO: 434
  Description of Artificial Sequence: Synthetic polypeptide
  XENP022874 [ICOS]_H0.44_L0.38_Fab_His Light Chain

SEQ ID NO: 761 - protein, 230 aa, Artificial Sequence
  Description of Artificial Sequence: Synthetic polypeptide
  XENP022875 [ICOS]_H0.56_L0.38_Fab_His Heavy Chain
QVQLVQSGAEVKKPGASVKVSCKASGYTFTGYYMHWVRQAPGQGLEWMGIINPHSGGTNYAQKFQGRVTMTRDTSISTAYMELSRLRSDDTAVYYCARTYYYDTSGYYHDAFDIWGQGTMVTVSSASTKGPSVFPLAPSSKSTSGGTAALGCLVKDYFPEPVTVSWNSGALTSGVHTFPAVLQSSGLYSLSSVVTVPSSSLGTQTYICNVNHKPSNTKVDKKVEPKSCGS

SEQ ID NO: 762 - protein, 214 aa, Artificial Sequence; identical to SEQ ID NO: 434
  Description of Artificial Sequence: Synthetic polypeptide
  XENP022875 [ICOS]_H0.56_L0.38_Fab_His Light Chain

SEQ ID NO: 763 - protein, 230 aa, Artificial Sequence
  Description of Artificial Sequence: Synthetic polypeptide
  XENP022876 [ICOS]_H0.62_L0.38_Fab_His Heavy Chain
QVQLVQSGAEVKKPGASVKVSCKASGYTFTGYYMHWVRQAPGQGLEWMGWINPHSGGTNYAQKFQGRVTMTEDTSTDTAYMELSRLRSDDTAVYYCARTYYYDTSGYYHDAFDVWGQGTMVTVSSASTKGPSVFPLAPSSKSTSGGTAALGCLVKDYFPEPVTVSWNSGALTSGVHTFPAVLQSSGLYSLSSVVTVPSSSLGTQTYICNVNHKPSNTKVDKKVEPKSCGS

SEQ ID NO: 764 - protein, 214 aa, Artificial Sequence; identical to SEQ ID NO: 434
  Description of Artificial Sequence: Synthetic polypeptide
  XENP022876 [ICOS]_H0.62_L0.38_Fab_His Light Chain

SEQ ID NO: 765 - protein, 230 aa, Artificial Sequence; identical to SEQ ID NO: 737
  Description of Artificial Sequence: Synthetic polypeptide
  XENP022929 [ICOS]_H0.35_L0.36_Fab_His Heavy Chain

SEQ ID NO: 766 - protein, 214 aa, Artificial Sequence; identical to SEQ ID NO: 414
  Description of Artificial Sequence: Synthetic polypeptide
  XENP022929 [ICOS]_H0.35_L0.36_Fab_His Light Chain

SEQ ID NO: 767 - protein, 230 aa, Artificial Sequence; identical to SEQ ID NO: 745
  Description of Artificial Sequence: Synthetic polypeptide
  XENP022930 [ICOS]_H0.61_L0.36_Fab_His Heavy Chain

SEQ ID NO: 768 - protein, 214 aa, Artificial Sequence; identical to SEQ ID NO: 414
  Description of Artificial Sequence: Synthetic polypeptide
  XENP022930 [ICOS]_H0.61_L0.36_Fab_His Light Chain

SEQ ID NO: 769 - protein, 230 aa, Artificial Sequence; identical to SEQ ID NO: 633
  Description of Artificial Sequence: Synthetic polypeptide
  XENP022938 [ICOS]_H0.24_L0.37_Fab_His Heavy Chain

SEQ ID NO: 770 - protein, 214 aa, Artificial Sequence; identical to SEQ ID NO: 424
  Description of Artificial Sequence: Synthetic polypeptide
  XENP022938 [ICOS]_H0.24_L0.37_Fab_His Light Chain

SEQ ID NO: 771 - protein, 230 aa, Artificial Sequence; identical to SEQ ID NO: 755
  Description of Artificial Sequence: Synthetic polypeptide
  XENP022939 [ICOS]_H0.37_L0.37_Fab_His Heavy Chain

SEQ ID NO: 772 - protein, 214 aa, Artificial Sequence; identical to SEQ ID NO: 424
  Description of Artificial Sequence: Synthetic polypeptide
  XENP022939 [ICOS]_H0.37_L0.37_Fab_His Light Chain

SEQ ID NO: 773 - protein, 230 aa, Artificial Sequence; identical to SEQ ID NO: 757
  Description of Artificial Sequence: Synthetic polypeptide
  XENP022940 [ICOS]_H0.40_L0.37_Fab_His Heavy Chain

SEQ ID NO: 774 - protein, 214 aa, Artificial Sequence; identical to SEQ ID NO: 424
  Description of Artificial Sequence: Synthetic polypeptide
  XENP022940 [ICOS]_H0.40_L0.37_Fab_His Light Chain

SEQ ID NO: 775 - protein, 230 aa, Artificial Sequence; identical to SEQ ID NO: 759
  Description of Artificial Sequence: Synthetic polypeptide
  XENP022941 [ICOS]_H0.44_L0.37_Fab_His Heavy Chain

SEQ ID NO: 776 - protein, 214 aa, Artificial Sequence; identical to SEQ ID NO: 424
  Description of Artificial Sequence: Synthetic polypeptide
  XENP022941 [ICOS]_H0.44_L0.37_Fab_His Light Chain

SEQ ID NO: 777 - protein, 230 aa, Artificial Sequence; identical to SEQ ID NO: 761
  Description of Artificial Sequence: Synthetic polypeptide
  XENP022942 [ICOS]_H0.56_L0.37_Fab_His Heavy Chain

SEQ ID NO: 778 - protein, 214 aa, Artificial Sequence; identical to SEQ ID NO: 424
  Description of Artificial Sequence: Synthetic polypeptide
  XENP022942 [ICOS]_H0.56_L0.37_Fab_His Light Chain

SEQ ID NO: 779 - protein, 230 aa, Artificial Sequence; identical to SEQ ID NO: 763
  Description of Artificial Sequence: Synthetic polypeptide
  XENP022943 [ICOS]_H0.62_L0.37_Fab_His Heavy Chain

SEQ ID NO: 780 - protein, 214 aa, Artificial Sequence; identical to SEQ ID NO: 424
  Description of Artificial Sequence: Synthetic polypeptide
  XENP022943 [ICOS]_H0.62_L0.37_Fab_His Light Chain

SEQ ID NO: 781 - protein, 230 aa, Artificial Sequence; identical to SEQ ID NO: 737
  Description of Artificial Sequence: Synthetic polypeptide
  XENP022944 [ICOS]_H0.35_L0.34_Fab_His Heavy Chain

SEQ ID NO: 782 - protein, 214 aa, Artificial Sequence; identical to SEQ ID NO: 404
  Description of Artificial Sequence: Synthetic polypeptide
  XENP022944 [ICOS]_H0.35_L0.34_Fab_His Light Chain

SEQ ID NO: 783 - protein, 230 aa, Artificial Sequence; identical to SEQ ID NO: 737
  Description of Artificial Sequence: Synthetic polypeptide
  XENP022945 [ICOS]_H0.35_L0.35_Fab_His Heavy Chain

SEQ ID NO: 784 - protein, 214 aa, Artificial Sequence; identical to SEQ ID NO: 724
  Description of Artificial Sequence: Synthetic polypeptide
  XENP022945 [ICOS]_H0.35_L0.35_Fab_His Light Chain

SEQ ID NO: 785 - protein, 230 aa, Artificial Sequence; identical to SEQ ID NO: 737
  Description of Artificial Sequence: Synthetic polypeptide
  XENP022946 [ICOS]_H0.35_L0.37_Fab_His Heavy Chain

SEQ ID NO: 786 - protein, 214 aa, Artificial Sequence; identical to SEQ ID NO: 424
  Description of Artificial Sequence: Synthetic polypeptide
  XENP022946 [ICOS]_H0.35_L0.37_Fab_His Light Chain

SEQ ID NO: 787 - protein, 230 aa, Artificial Sequence; identical to SEQ ID NO: 745
  Description of Artificial Sequence: Synthetic polypeptide
  XENP022947 [ICOS]_H0.61_L0.34_Fab_His Heavy Chain

SEQ ID NO: 788 - protein, 214 aa, Artificial Sequence; identical to SEQ ID NO: 404
  Description of Artificial Sequence: Synthetic polypeptide
  XENP022947 [ICOS]_H0.61_L0.34_Fab_His Light Chain

SEQ ID NO: 789 - protein, 230 aa, Artificial Sequence; identical to SEQ ID NO: 745
  Description of Artificial Sequence: Synthetic polypeptide
  XENP022948 [ICOS]_H0.61_L0.35_Fab_His Heavy Chain

SEQ ID NO: 790 - protein, 214 aa, Artificial Sequence; identical to SEQ ID NO: 724
  Description of Artificial Sequence: Synthetic polypeptide
  XENP022948 [ICOS]_H0.61_L0.35_Fab_His Light Chain

SEQ ID NO: 791 - protein, 230 aa, Artificial Sequence; identical to SEQ ID NO: 745
  Description of Artificial Sequence: Synthetic polypeptide
  XENP022949 [ICOS]_H0.61_L0.37_Fab_His Heavy Chain

SEQ ID NO: 792 - protein, 214 aa, Artificial Sequence; identical to SEQ ID NO: 424
  Description of Artificial Sequence: Synthetic polypeptide
  XENP022949 [ICOS]_H0.61_L0.37_Fab_His Light Chain

SEQ ID NO: 793 - protein, 230 aa, Artificial Sequence; identical to SEQ ID NO: 755
  Description of Artificial Sequence: Synthetic polypeptide
  XENP023086 [ICOS]_H0.37_L0_Fab_His Heavy Chain

SEQ ID NO: 794 - protein, 214 aa, Artificial Sequence; identical to SEQ ID NO: 146
  Description of Artificial Sequence: Synthetic polypeptide
  XENP023086 [ICOS]_H0.37_L0_Fab_His Light Chain

SEQ ID NO: 795 - protein, 230 aa, Artificial Sequence
  Description of Artificial Sequence: Synthetic polypeptide
  XENP023087 [ICOS]_H0.64_L0_Fab_His Heavy Chain
QVQLVQSGAEVKKPGASVKVSCKASGYTFTGYYMHWVRQAPGQGLEWMGWINPHSGGTNYAQKFQGRVTMTEDTSTDTAYMELSSLRSEDTAVYYCARTYYYDTSGYYHDAFDVWGQGTMVTVSSASTKGPSVFPLAPSSKSTSGGTAALGCLVKDYFPEPVTVSWNSGALTSGVHTFPAVLQSSGLYSLSSVVTVPSSSLGTQTYICNVNHKPSNTKVDKKVEPKSCGS

SEQ ID NO: 796 - protein, 214 aa, Artificial Sequence; identical to SEQ ID NO: 146
  Description of Artificial Sequence: Synthetic polypeptide
  XENP023087 [ICOS]_H0.64_L0_Fab_His Light Chain

SEQ ID NO: 797 - protein, 230 aa, Artificial Sequence; identical to SEQ ID NO: 439
  Description of Artificial Sequence: Synthetic polypeptide
  XENP023088 [ICOS]_H0.66_L0_Fab_His Heavy Chain

SEQ ID NO: 798 - protein, 214 aa, Artificial Sequence; identical to SEQ ID NO: 146
  Description of Artificial Sequence: Synthetic polypeptide
  XENP023088 [ICOS]_H0.66_L0_Fab_His Light Chain

SEQ ID NO: 799 - protein, 230 aa, Artificial Sequence
  Description of Artificial Sequence: Synthetic polypeptide
  XENP023089 [ICOS]_H0.67_L0_Fab_His Heavy Chain
QVQLVQSGAEVKKPGASVKVSCKASGYTFTGYYMHWVRQAPGQGLEWMGWINPHSGETIYAQKFQGRVTMTEDTSTDTAYMELSSLRSEDTAVYYCARTYYYDTSGYYHDAFDVWGQGTMVTVSSASTKGPSVFPLAPSSKSTSGGTAALGCLVKDYFPEPVTVSWNSGALTSGVHTFPAVLQSSGLYSLSSVVTVPSSSLGTQTYICNVNHKPSNTKVDKKVEPKSCGS

SEQ ID NO: 800 - protein, 214 aa, Artificial Sequence; identical to SEQ ID NO: 146
  Description of Artificial Sequence: Synthetic polypeptide
  XENP023089 [ICOS]_H0.67_L0_Fab_His Light Chain

SEQ ID NO: 801 - protein, 230 aa, Artificial Sequence; identical to SEQ ID NO: 439
  Description of Artificial Sequence: Synthetic polypeptide
  XENP023409 [ICOS]_H0.66_L0.34_Fab_His Heavy Chain

SEQ ID NO: 802 - protein, 214 aa, Artificial Sequence; identical to SEQ ID NO: 404
  Description of Artificial Sequence: Synthetic polypeptide
  XENP023409 [ICOS]_H0.66_L0.34_Fab_His Light Chain

1. (canceled)

2. A heterodimeric protein comprising:
a) a first monomer comprising, from N- to C-terminal:
i) an IL-15Rα sushi domain;
ii) a first domain linker;
iii) a variant IL-15 domain;
iv) a second domain linker;
v) a first variant Fc domain comprising CH2-CH3; and
b) a second monomer comprising a heavy chain comprising VH1-CH1-hinge-CH2-CH3, wherein said CH2-CH3 is a second variant Fc domain; and
c) a light chain comprising VL-CL;
wherein said VH1 and VL form an antigen binding domain that binds human ICOS.

3.-30. (canceled)

31. The heterodimeric protein according to claim 2 wherein said VH and VL are selected from the pairs selected from the group consisting of [ICOS]_H0 and [ICOS]L0 from FIG. 24; [ICOS]_H0.66 and [ICOS]_L0 from FIG. 24; Jmab-136[ICOS]vh and vl from FIG. 60; ICOS 314.8[ICOS]vh and vl from FIG. 60; H2L5[ICOS] vh and vl from FIG. 60; 37A10S713[ICOS] vh and vl from FIG. 60; C398.4A[ICOS] vh and vl from FIG. 60; ICOS.33[ICOS] vh and vl from FIG. 60; STIM001[ICOS] vh and vl from FIG. 60; and STIM003[ICOS] vh and vl from FIG. 60.

32. The heterodimeric protein according to claim 2 wherein the first and the second Fc domains have a set of amino acid substitutions selected from the group consisting of S267K/L368D/K370S:S267K/S364K/E357Q; S364K/E357Q:L368D/K370S; L368D/K370S:S364K; L368E/K370S:S364K; T411E/K360E/Q362E:D401K; L368D/K370S:S364K/E357L; K370S:S364K/E357Q; T366S/L368A/Y407V:T366W; T366S/L368A/Y407V/Y349C:T366W/S354C; and T366S/L368A/Y407V/S354C:T366W/Y349C, according to EU numbering.

33. The heterodimeric protein according to claim 2 wherein the first and the second Fc domains have S364K/E357Q:L368D/K370S.

34. The heterodimeric protein according to claim 2 wherein said variant Fc domains each comprise M428L/N434S.

35. The heterodimeric protein according to claim 2 wherein said variant Fc domains each comprise E233P/L234V/L235A/G236del/S267K.

36. The heterodimeric protein according to claim 2 wherein said variant IL-15 domain comprises an amino acid substitution(s) selected from the group consisting of N1D, N4D, D8N, D30N, V49R, D61N, E64Q, N65D, N72D, Q108E, N4D/N65D, D30N/N65D, D30N/E64Q/N65D, N1G/D30N/E46G/V49R/E64Q, N1A/D30N/E46G/V49R, and D22N/Y26F/E46Q/E53Q/E89Q/E93Q.

37. A heterodimeric protein according to claim 2 selected from the group consisting of XENP29975, XENP29978, XENP30810, XENP30811, XENP30812 and XENP30813.

38.-40. (canceled)
